United States Patent Application Publication US 2026/0265737 A1, published September 10, 2026 (application 18/877,507).

The application's sequence listing, which the Patent Office published only in electronic form, follows.

SEQUENCE LISTING (367 sequences)

SEQ ID NO: 1 - DNA, 10 bp, synthetic construct
  source 1..10: mol_type = other DNA
  modified_base 1: mod_base = OTHER; note = 2'-deoxythymidine-3'-phosphate 5'-(trans-5-methoxy-1,2-dithian-4-yl phosphate)
tttttttttt

SEQ ID NO: 2 - DNA, 10 bp, synthetic construct
  source 1..10: mol_type = other DNA
  modified_base 1: mod_base = OTHER; note = 2'-deoxythymidine-3'-phosphate 5'-(trans-5-methoxy-1,2-dithian-4-yl thiophosphate)
tttttttttt

SEQ ID NO: 3 - RNA, 23 nt, synthetic construct
  source 1..23: mol_type = other RNA
  modified_base 1: mod_base = OTHER; note = 2'-O-methyluridine-3'-phosphorothioate 5'-(trans-5-methoxy-1,2-dithian-4-yl phosphate)
  modified_base 2: mod_base = OTHER; note = 2'-deoxy-2'-fluorocytidine-3'-phosphorothioate
  modified_base 3: mod_base = OTHER; note = 2'-O-methyladenosine-3'-phosphate
  modified_base 4: mod_base = OTHER; note = 2'-O-methylcytidine-3'-phosphate
  modified_base 5: mod_base = OTHER; note = 2'-O-methyluridine-3'-phosphate
  modified_base 6: mod_base = OTHER; note = 2'-deoxy-2'-fluorouridine-3'-phosphate
  modified_base 7: mod_base = OTHER; note = 2'-O-methyluridine-3'-phosphate
  modified_base 8: mod_base = OTHER; note = 2'-deoxy-2'-fluoroadenosine-3'-phosphate
  modified_base 9: mod_base = OTHER; note = 2'-deoxy-2'-fluorouridine-3'-phosphate
  modified_base 10: mod_base = OTHER; note = 2'-O-methyluridine-3'-phosphate
  modified_base 11: mod_base = OTHER; note = 2'-O-methylguanosine-3'-phosphate
  modified_base 12: mod_base = OTHER; note = 2'-O-methyladenosine-3'-phosphate
  modified_base 13: mod_base = OTHER; note = 2'-O-methylguanosine-3'-phosphate
  modified_base 14: mod_base = OTHER; note = 2'-deoxy-2'-fluorouridine-3'-phosphate
  modified_base 15: mod_base = OTHER; note = 2'-O-methyluridine-3'-phosphate
  modified_base 16: mod_base = OTHER; note = 2'-deoxy-2'-fluorouridine-3'-phosphate
  modified_base 17: mod_base = OTHER; note = 2'-O-methylcytidine-3'-phosphate
  modified_base 18: mod_base = OTHER; note = 2'-O-methyluridine-3'-phosphate
  modified_base 19: mod_base = OTHER; note = 2'-O-methylguanosine-3'-phosphate
  modified_base 20: mod_base = OTHER; note = 2'-O-methyluridine-3'-phosphate
  modified_base 21: mod_base = OTHER; note = 2'-O-methylguanosine-3'-phosphorothioate
  modified_base 22: mod_base = OTHER; note = 2'-O-methylcytidine-3'-phosphorothioate
  modified_base 23: mod_base = OTHER; note = 2'-O-methylcytidine
tcactttattgagtttctgtgcc

SEQ ID NO: 4 - RNA, 23 nt, synthetic construct
  source 1..23: mol_type = other RNA
  modified_base 1: mod_base = OTHER; note = 2'-O-methyluridine-3'-phosphate 5'-(trans-5-methoxy-1,2-dithian-4-yl phosphate)
  modified_base 2: mod_base = OTHER; note = 2'-deoxy-2'-fluorocytidine-3'-phosphate
  modified_base 3: mod_base = OTHER; note = 2'-O-methyladenosine-3'-phosphate
  modified_base 4: mod_base = OTHER; note = 2'-O-methylcytidine-3'-phosphate
  modified_base 5: mod_base = OTHER; note = 2'-O-methyluridine-3'-phosphate
  modified_base 6: mod_base = OTHER; note = 2'-deoxy-2'-fluorouridine-3'-phosphate
  modified_base 7: mod_base = OTHER; note = 2'-O-methyluridine-3'-phosphate
  modified_base 8: mod_base = OTHER; note = 2'-deoxy-2'-fluoroadenosine-3'-phosphate
  modified_base 9: mod_base = OTHER; note = 2'-deoxy-2'-fluorouridine-3'-phosphate
  modified_base 10: mod_base = OTHER; note = 2'-O-methyluridine-3'-phosphate
  modified_base 11: mod_base = OTHER; note = 2'-O-methylguanosine-3'-phosphate
  modified_base 12: mod_base = OTHER; note = 2'-O-methyladenosine-3'-phosphate
  modified_base 13: mod_base = OTHER; note = 2'-O-methylguanosine-3'-phosphate
  modified_base 14: mod_base = OTHER; note = 2'-deoxy-2'-fluorouridine-3'-phosphate
  modified_base 15: mod_base = OTHER; note = 2'-O-methyluridine-3'-phosphate
  modified_base 16: mod_base = OTHER; note = 2'-deoxy-2'-fluorouridine-3'-phosphate
  modified_base 17: mod_base = OTHER; note = 2'-O-methylcytidine-3'-phosphate
  modified_base 18: mod_base = OTHER; note = 2'-O-methyluridine-3'-phosphate
  modified_base 19: mod_base = OTHER; note = 2'-O-methylguanosine-3'-phosphate
  modified_base 20: mod_base = OTHER; note = 2'-O-methyluridine-3'-phosphate
  modified_base 21: mod_base = OTHER; note = 2'-O-methylguanosine-3'-phosphorothioate
  modified_base 22: mod_base = OTHER; note = 2'-O-methylcytidine-3'-phosphorothioate
  modified_base 23: mod_base = OTHER; note = 2'-O-methylcytidine
tcactttattgagtttctgtgcc

SEQ ID NO: 5 - RNA, 23 nt, synthetic construct
  source 1..23: mol_type = other RNA
  modified_base 1: mod_base = OTHER; note = 2'-O-methyluridine-3'-phosphorothioate 5'-(trans-5-methoxy-1,2-dithian-4-yl thiophosphate)
  modified_base 2: mod_base = OTHER; note = 2'-deoxy-2'-fluorocytidine-3'-phosphorothioate
  modified_base 3: mod_base = OTHER; note = 2'-O-methyladenosine-3'-phosphate
  modified_base 4: mod_base = OTHER; note = 2'-O-methylcytidine-3'-phosphate
  modified_base 5: mod_base = OTHER; note = 2'-O-methyluridine-3'-phosphate
  modified_base 6: mod_base = OTHER; note = 2'-deoxy-2'-fluorouridine-3'-phosphate
  modified_base 7: mod_base = OTHER; note = 2'-O-methyluridine-3'-phosphate
  modified_base 8: mod_base = OTHER; note = 2'-deoxy-2'-fluoroadenosine-3'-phosphate
  modified_base 9: mod_base = OTHER; note = 2'-deoxy-2'-fluorouridine-3'-phosphate
  modified_base 10: mod_base = OTHER; note = 2'-O-methyluridine-3'-phosphate
  modified_base 11: mod_base = OTHER; note = 2'-O-methylguanosine-3'-phosphate
  modified_base 12: mod_base = OTHER; note = 2'-O-methyladenosine-3'-phosphate
  modified_base 13: mod_base = OTHER; note = 2'-O-methylguanosine-3'-phosphate
  modified_base 14: mod_base = OTHER; note = 2'-deoxy-2'-fluorouridine-3'-phosphate
  modified_base 15: mod_base = OTHER; note = 2'-O-methyluridine-3'-phosphate
  modified_base 16: mod_base = OTHER; note = 2'-deoxy-2'-fluorouridine-3'-phosphate
  modified_base 17: mod_base = OTHER; note = 2'-O-methylcytidine-3'-phosphate
  modified_base 18: mod_base = OTHER; note = 2'-O-methyluridine-3'-phosphate
  modified_base 19: mod_base = OTHER; note = 2'-O-methylguanosine-3'-phosphate
  modified_base 20: mod_base = OTHER; note = 2'-O-methyluridine-3'-phosphate
  modified_base 21: mod_base = OTHER; note = 2'-O-methylguanosine-3'-phosphorothioate
  modified_base 22: mod_base = OTHER; note = 2'-O-methylcytidine-3'-phosphorothioate
  modified_base 23: mod_base = OTHER; note = 2'-O-methylcytidine
tcactttattgagtttctgtgcc

SEQ ID NO: 6 - RNA, 23 nt, synthetic construct
  source 1..23: mol_type = other RNA
  modified_base 1: mod_base = OTHER; note = 2'-O-methyluridine-3'-phosphorothioate 5'-(trans-5-methoxy-1,2-dithian-4-yl thiophosphate)
  modified_base 2: mod_base = OTHER; note = 2'-deoxy-2'-fluorocytidine-3'-phosphorothioate
  modified_base 3: mod_base = OTHER; note = 2'-O-methyladenosine-3'-phosphate
  modified_base 4: mod_base = OTHER; note = 2'-O-methylcytidine-3'-phosphate
  modified_base 5: mod_base = OTHER; note = 2'-O-methyluridine-3'-phosphate
  modified_base 6: mod_base = OTHER; note = 2'-deoxy-2'-fluorouridine-3'-phosphate
  modified_base 7: mod_base = OTHER; note = 2'-O-methyluridine-3'-phosphate
  modified_base 8: mod_base = OTHER; note = 2'-deoxy-2'-fluoroadenosine-3'-phosphate
  modified_base 9: mod_base = OTHER; note = 2'-deoxy-2'-fluorouridine-3'-phosphate
  modified_base 10: mod_base = OTHER; note = 2'-O-methyluridine-3'-phosphate
  modified_base 11: mod_base = OTHER; note = 2'-O-methylguanosine-3'-phosphate
  modified_base 12: mod_base = OTHER; note = 2'-O-methyladenosine-3'-phosphate
  modified_base 13: mod_base = OTHER; note = 2'-O-methylguanosine-3'-phosphate
  modified_base 14: mod_base = OTHER; note = 2'-deoxy-2'-fluorouridine-3'-phosphate
  modified_base 15: mod_base = OTHER; note = 2'-O-methyluridine-3'-phosphate
  modified_base 16: mod_base = OTHER; note = 2'-deoxy-2'-fluorouridine-3'-phosphate
  modified_base 17: mod_base = OTHER; note = 2'-O-methylcytidine-3'-phosphate
  modified_base 18: mod_base = OTHER; note = 2'-O-methyluridine-3'-phosphate
  modified_base 19: mod_base = OTHER; note = 2'-O-methylguanosine-3'-phosphate
  modified_base 20: mod_base = OTHER; note = 2'-O-methyluridine-3'-phosphate
  modified_base 21: mod_base = OTHER; note = 2'-O-methylguanosine-3'-phosphorothioate
  modified_base 22: mod_base = OTHER; note = 2'-O-methylcytidine-3'-phosphorothioate
  modified_base 23: mod_base = OTHER; note = 2'-O-methylcytidine
tcactttattgagtttctgtgcc

SEQ ID NO: 7 - RNA, 23 nt, synthetic construct
  source 1..23: mol_type = other RNA
  modified_base 1: mod_base = OTHER; note = 2'-O-methyluridine-3'-phosphate 5'-(trans-5-methoxy-1,2-dithian-4-yl thiophosphate)
  modified_base 2: mod_base = OTHER; note = 2'-deoxy-2'-fluorocytidine-3'-phosphate
  modified_base 3: mod_base = OTHER; note = 2'-O-methyladenosine-3'-phosphate
  modified_base 4: mod_base = OTHER; note = 2'-O-methylcytidine-3'-phosphate
  modified_base 5: mod_base = OTHER; note = 2'-O-methyluridine-3'-phosphate
  modified_base 6: mod_base = OTHER; note = 2'-deoxy-2'-fluorouridine-3'-phosphate
  modified_base 7: mod_base = OTHER; note = 2'-O-methyluridine-3'-phosphate
  modified_base 8: mod_base = OTHER; note = 2'-deoxy-2'-fluoroadenosine-3'-phosphate
  modified_base 9: mod_base = OTHER; note = 2'-deoxy-2'-fluorouridine-3'-phosphate
  modified_base 10: mod_base = OTHER; note = 2'-O-methyluridine-3'-phosphate
  modified_base 11: mod_base = OTHER; note = 2'-O-methylguanosine-3'-phosphate
  modified_base 12: mod_base = OTHER; note = 2'-O-methyladenosine-3'-phosphate
  modified_base 13: mod_base = OTHER; note = 2'-O-methylguanosine-3'-phosphate
  modified_base 14: mod_base = OTHER; note = 2'-deoxy-2'-fluorouridine-3'-phosphate
  modified_base 15: mod_base = OTHER; note = 2'-O-methyluridine-3'-phosphate
  modified_base 16: mod_base = OTHER; note = 2'-deoxy-2'-fluorouridine-3'-phosphate
  modified_base 17: mod_base = OTHER; note = 2'-O-methylcytidine-3'-phosphate
  modified_base 18: mod_base = OTHER; note = 2'-O-methyluridine-3'-phosphate
  modified_base 19: mod_base = OTHER; note = 2'-O-methylguanosine-3'-phosphate
  modified_base 20: mod_base = OTHER; note = 2'-O-methyluridine-3'-phosphate
  modified_base 21: mod_base = OTHER; note = 2'-O-methylguanosine-3'-phosphorothioate
  modified_base 22: mod_base = OTHER; note = 2'-O-methylcytidine-3'-phosphorothioate
  modified_base 23: mod_base = OTHER; note = 2'-O-methylcytidine
tcactttattgagtttctgtgcc

SEQ ID NO: 8 - RNA, 23 nt, synthetic construct
  source 1..23: mol_type = other RNA
  modified_base 1: mod_base = OTHER; note = 2'-O-methyluridine-3'-phosphorothioate 5'-(trans-5-methoxy-1,2-dithian-4-yl thiophosphate)
  modified_base 2: mod_base = OTHER; note = 2'-deoxy-2'-fluorocytidine-3'-phosphorothioate
  modified_base 3: mod_base = OTHER; note = 2'-O-methyladenosine-3'-phosphate
  modified_base 4: mod_base = OTHER; note = 2'-O-methylcytidine-3'-phosphate
  modified_base 5: mod_base = OTHER; note = 2'-O-methyluridine-3'-phosphate
  modified_base 6: mod_base = OTHER; note = 2'-deoxy-2'-fluorouridine-3'-phosphate
  modified_base 7: mod_base = OTHER; note = 2'-O-methyluridine-3'-phosphate
  modified_base 8: mod_base = OTHER; note = 2'-deoxy-2'-fluoroadenosine-3'-phosphate
  modified_base 9: mod_base = OTHER; note = 2'-deoxy-2'-fluorouridine-3'-phosphate
  modified_base 10: mod_base = OTHER; note = 2'-O-methyluridine-3'-phosphate
  modified_base 11: mod_base = OTHER; note = 2'-O-methylguanosine-3'-phosphate
  modified_base 12: mod_base = OTHER; note = 2'-O-methyladenosine-3'-phosphate
  modified_base 13: mod_base = OTHER; note = 2'-O-methylguanosine-3'-phosphate
  modified_base 14: mod_base = OTHER; note = 2'-deoxy-2'-fluorouridine-3'-phosphate
  modified_base 15: mod_base = OTHER; note = 2'-O-methyluridine-3'-phosphate
  modified_base 16: mod_base = OTHER; note = 2'-deoxy-2'-fluorouridine-3'-phosphate
  modified_base 17: mod_base = OTHER; note = 2'-O-methylcytidine-3'-phosphate
  modified_base 18: mod_base = OTHER; note = 2'-O-methyluridine-3'-phosphate
  modified_base 19: mod_base = OTHER; note = 2'-O-methylguanosine-3'-phosphate
  modified_base 20: mod_base = OTHER; note = 2'-O-methyluridine-3'-phosphate
  modified_base 21: mod_base = OTHER; note = 2'-O-methylguanosine-3'-phosphorothioate
  modified_base 22: mod_base = OTHER; note = 2'-O-methylcytidine-3'-phosphorothioate
  modified_base 23: mod_base = OTHER; note = 2'-O-methylcytidine
tcactttattgagtttctgtgcc

SEQ ID NO: 9 - RNA, 23 nt, synthetic construct
  source 1..23: mol_type = other RNA
  modified_base 1: mod_base = OTHER; note = 2'-O-methyluridine-3'-phosphate 5'-(trans-5-methoxy-1,2-dithian-4-yl thiophosphate)
  modified_base 2: mod_base = OTHER; note = 2'-deoxy-2'-fluorouridine-3'-phosphate
  modified_base 3: mod_base = OTHER; note = 2'-O-methyladenosine-3'-phosphate
  modified_base 4: mod_base = OTHER; note = 2'-O-methyluridine-3'-phosphate
  modified_base 5: mod_base = OTHER; note = 2'-O-methyladenosine-3'-phosphate
  modified_base 6: mod_base = OTHER; note = 2'-deoxy-2'-fluoroguanosine-3'-phosphate
  modified_base 7: mod_base = OTHER; note = 2'-O-methyladenosine-3'-phosphate
  modified_base 8: mod_base = OTHER; note = 2'-O-methylguanosine-3'-phosphate
  modified_base 9: mod_base = OTHER; note = 2'-O-methylcytidine-3'-phosphate
  modified_base 10: mod_base = OTHER; note = 2'-O-methyladenosine-3'-phosphate
  modified_base 11: mod_base = OTHER; note = 2'-O-methyladenosine-3'-phosphate
  modified_base 12: mod_base = OTHER; note = 2'-O-methylguanosine-3'-phosphate
  modified_base 13: mod_base = OTHER; note = 2'-O-methyladenosine-3'-phosphate
  modified_base 14: mod_base = OTHER; note = 2'-deoxy-2'-fluoroadenosine-3'-phosphate
  modified_base 15: mod_base = OTHER; note = 2'-O-methylcytidine-3'-phosphate
  modified_base 16: mod_base = OTHER; note = 2'-deoxy-2'-fluoroadenosine-3'-phosphate
  modified_base 17: mod_base = OTHER; note = 2'-O-methylcytidine-3'-phosphate
  modified_base 18: mod_base = OTHER; note = 2'-O-methyluridine-3'-phosphate
  modified_base 19: mod_base = OTHER; note = 2'-O-methylguanosine-3'-phosphate
  modified_base 20: mod_base = OTHER; note = 2'-O-methyluridine-3'-phosphate
  modified_base 21: mod_base = OTHER; note = 2'-O-methyluridine-3'-phosphorothioate
  modified_base 22: mod_base = OTHER; note = 2'-O-methyluridine-3'-phosphorothioate
  modified_base 23: mod_base = OTHER; note = 2'-O-methyluridine
ttatagagcaagaacactgtttt

SEQ ID NO: 10 - RNA, 23 nt, synthetic construct
  source 1..23: mol_type = other RNA
  modified_base 1: mod_base = OTHER; note = 2'-O-methyluridine-3'-phosphate 5'-(trans-5-methoxy-1,2-dithian-4-yl thiophosphate)
  modified_base 2: mod_base = OTHER; note = 2'-deoxy-2'-fluorouridine-3'-phosphate
  modified_base 3: mod_base = OTHER; note = 2'-O-methyluridine-3'-phosphate
  modified_base 4: mod_base = OTHER; note = 2'-O-methyladenosine-3'-phosphate
  modified_base 5: mod_base = OTHER; note = 2'-O-methylguanosine-3'-phosphate
  modified_base 6: mod_base = OTHER; note = 2'-deoxy-2'-fluoroadenosine-3'-phosphate
  modified_base 7: mod_base = OTHER; note = 2'-O-methylguanosine-3'-phosphate
  modified_base 8: mod_base = OTHER; note = 2'-deoxy-2'-fluorouridine-3'-phosphate
  modified_base 9: mod_base = OTHER; note = 2'-deoxy-2'-fluoroguanosine-3'-phosphate
  modified_base 10: mod_base = OTHER; note = 2'-O-methyladenosine-3'-phosphate
  modified_base 11: mod_base = OTHER; note = 2'-O-methylguanosine-3'-phosphate
  modified_base 12: mod_base = OTHER; note = 2'-O-methylguanosine-3'-phosphate
  modified_base 13: mod_base = OTHER; note = 2'-O-methyladenosine-3'-phosphate
  modified_base 14: mod_base = OTHER; note = 2'-deoxy-2'-fluorouridine-3'-phosphate
  modified_base 15: mod_base = OTHER; note = 2'-O-methyluridine-3'-phosphate
  modified_base 16: mod_base = OTHER; note = 2'-deoxy-2'-fluoroadenosine-3'-phosphate
  modified_base 17: mod_base = OTHER; note = 2'-O-methyladenosine-3'-phosphate
  modified_base 18: mod_base = OTHER; note = 2'-O-methyladenosine-3'-phosphate
  modified_base 19: mod_base = OTHER; note = 2'-O-methyladenosine-3'-phosphate
  modified_base 20: mod_base = OTHER; note = 2'-O-methyluridine-3'-phosphate
  modified_base 21: mod_base = OTHER; note = 2'-O-methylguanosine-3'-phosphorothioate
  modified_base 22: mod_base = OTHER; note = 2'-O-methyladenosine-3'-phosphorothioate
  modified_base 23: mod_base = OTHER; note = 2'-O-methylguanosine
tttagagtgaggattaaaatgag

SEQ ID NO: 11 - RNA, 23 nt, synthetic construct
  source 1..23: mol_type = other RNA
  modified_base 1: mod_base = OTHER; note = 2'-O-methyluridine-3'-phosphorothioate 5'-(trans-2-methoxycyclohex-1-yl phosphate)
  modified_base 2: mod_base = OTHER; note = 2'-deoxy-2'-fluorocytidine-3'-phosphorothioate
  modified_base 3: mod_base = OTHER; note = 2'-O-methyladenosine-3'-phosphate
  modified_base 4: mod_base = OTHER; note = 2'-O-methylcytidine-3'-phosphate
  modified_base 5: mod_base = OTHER; note = 2'-O-methyluridine-3'-phosphate
  modified_base 6: mod_base = OTHER; note = 2'-deoxy-2'-fluorouridine-3'-phosphate
  modified_base 7: mod_base = OTHER; note = 2'-O-methyluridine-3'-phosphate
  modified_base 8: mod_base = OTHER; note = 2'-deoxy-2'-fluoroadenosine-3'-phosphate
  modified_base 9: mod_base = OTHER; note = 2'-deoxy-2'-fluorouridine-3'-phosphate
  modified_base 10: mod_base = OTHER; note = 2'-O-methyluridine-3'-phosphate
  modified_base 11: mod_base = OTHER; note = 2'-O-methylguanosine-3'-phosphate
  modified_base 12: mod_base = OTHER; note = 2'-O-methyladenosine-3'-phosphate
  modified_base 13: mod_base = OTHER; note = 2'-O-methylguanosine-3'-phosphate
  modified_base 14: mod_base = OTHER; note = 2'-deoxy-2'-fluorouridine-3'-phosphate
  modified_base 15: mod_base = OTHER; note = 2'-O-methyluridine-3'-phosphate
  modified_base 16: mod_base = OTHER; note = 2'-deoxy-2'-fluorouridine-3'-phosphate
  modified_base 17: mod_base = OTHER; note = 2'-O-methylcytidine-3'-phosphate
  modified_base 18: mod_base = OTHER; note = 2'-O-methyluridine-3'-phosphate
  modified_base 19: mod_base = OTHER; note = 2'-O-methylguanosine-3'-phosphate
  modified_base 20: mod_base = OTHER; note = 2'-O-methyluridine-3'-phosphate
  modified_base 21: mod_base = OTHER; note = 2'-O-methylguanosine-3'-phosphorothioate
  modified_base 22: mod_base = OTHER; note = 2'-O-methylcytidine-3'-phosphorothioate
  modified_base 23: mod_base = OTHER; note = 2'-O-methylcytidine
tcactttattgagtttctgtgcc

SEQ ID NO: 12 - RNA, 23 nt, synthetic construct
  source 1..23: mol_type = other RNA
  modified_base 1: mod_base = OTHER; note = 2'-O-methyluridine-3'-phosphorothioate 5'-(trans-2-methoxycyclohex-1-yl thiophosphate)
  modified_base 2: mod_base = OTHER; note = 2'-deoxy-2'-fluorocytidine-3'-phosphorothioate
  modified_base 3: mod_base = OTHER; note = 2'-O-methyladenosine-3'-phosphate
  modified_base 4: mod_base = OTHER; note = 2'-O-methylcytidine-3'-phosphate
  modified_base 5: mod_base = OTHER; note = 2'-O-methyluridine-3'-phosphate
  modified_base 6: mod_base = OTHER; note = 2'-deoxy-2'-fluorouridine-3'-phosphate
  modified_base 7: mod_base = OTHER; note = 2'-O-methyluridine-3'-phosphate
  modified_base 8: mod_base = OTHER; note = 2'-deoxy-2'-fluoroadenosine-3'-phosphate
  modified_base 9: mod_base = OTHER; note = 2'-deoxy-2'-fluorouridine-3'-phosphate
  modified_base 10: mod_base = OTHER; note = 2'-O-methyluridine-3'-phosphate
  modified_base 11: mod_base = OTHER; note = 2'-O-methylguanosine-3'-phosphate
  modified_base 12: mod_base = OTHER; note = 2'-O-methyladenosine-3'-phosphate
  modified_base 13: mod_base = OTHER; note = 2'-O-methylguanosine-3'-phosphate
  modified_base 14: mod_base = OTHER; note = 2'-deoxy-2'-fluorouridine-3'-phosphate
  modified_base 15: mod_base = OTHER; note = 2'-O-methyluridine-3'-phosphate
  modified_base 16: mod_base = OTHER; note = 2'-deoxy-2'-fluorouridine-3'-phosphate
  modified_base 17: mod_base = OTHER; note = 2'-O-methylcytidine-3'-phosphate
  modified_base 18: mod_base = OTHER; note = 2'-O-methyluridine-3'-phosphate
  modified_base 19: mod_base = OTHER; note = 2'-O-methylguanosine-3'-phosphate
  modified_base 20: mod_base = OTHER; note = 2'-O-methyluridine-3'-phosphate
  modified_base 21: mod_base = OTHER; note = 2'-O-methylguanosine-3'-phosphorothioate
  modified_base 22: mod_base = OTHER; note = 2'-O-methylcytidine-3'-phosphorothioate
  modified_base 23: mod_base = OTHER; note = 2'-O-methylcytidine
tcactttattgagtttctgtgcc

SEQ ID NO: 13 - RNA, 23 nt, synthetic construct
  source 1..23: mol_type = other RNA
  modified_base 1: mod_base = OTHER; note = 2'-O-methyluridine-3'-phosphorothioate 5'-(trans-5-hydroxy-1,2-dithian-4-yl phosphate)
  modified_base 2: mod_base = OTHER; note = 2'-deoxy-2'-fluorocytidine-3'-phosphorothioate
  modified_base 3: mod_base = OTHER; note = 2'-O-methyladenosine-3'-phosphate
  modified_base 4: mod_base = OTHER; note = 2'-O-methylcytidine-3'-phosphate
  modified_base 5: mod_base = OTHER; note = 2'-O-methyluridine-3'-phosphate
  modified_base 6: mod_base = OTHER; note = 2'-deoxy-2'-fluorouridine-3'-phosphate
  modified_base 7: mod_base = OTHER; note = 2'-O-methyluridine-3'-phosphate
  modified_base 8: mod_base = OTHER; note = 2'-deoxy-2'-fluoroadenosine-3'-phosphate
  modified_base 9: mod_base = OTHER; note = 2'-deoxy-2'-fluorouridine-3'-phosphate
  modified_base 10: mod_base = OTHER; note = 2'-O-methyluridine-3'-phosphate
  modified_base 11: mod_base = OTHER; note = 2'-O-methylguanosine-3'-phosphate
  modified_base 12: mod_base = OTHER; note = 2'-O-methyladenosine-3'-phosphate
  modified_base 13: mod_base = OTHER; note = 2'-O-methylguanosine-3'-phosphate
  modified_base 14: mod_base = OTHER; note = 2'-deoxy-2'-fluorouridine-3'-phosphate
  modified_base 15: mod_base = OTHER; note = 2'-O-methyluridine-3'-phosphate
  modified_base 16: mod_base = OTHER; note = 2'-deoxy-2'-fluorouridine-3'-phosphate
  modified_base 17: mod_base = OTHER; note = 2'-O-methylcytidine-3'-phosphate
  modified_base 18: mod_base = OTHER; note = 2'-O-methyluridine-3'-phosphate
  modified_base 19: mod_base = OTHER; note = 2'-O-methylguanosine-3'-phosphate
  modified_base 20: mod_base = OTHER; note = 2'-O-methyluridine-3'-phosphate
  modified_base 21: mod_base = OTHER; note = 2'-O-methylguanosine-3'-phosphorothioate
  modified_base 22: mod_base = OTHER; note = 2'-O-methylcytidine-3'-phosphorothioate
  modified_base 23: mod_base = OTHER; note = 2'-O-methylcytidine
tcactttattgagtttctgtgcc

SEQ ID NO: 14 - RNA, 23 nt, synthetic construct
  source 1..23: mol_type = other RNA
  modified_base 1: mod_base = OTHER; note = 2'-O-methyluridine-3'-phosphorothioate 5'-(trans-5-hydroxy-1,2-dithian-4-yl thiophosphate)
  modified_base 2: mod_base = OTHER; note = 2'-deoxy-2'-fluorocytidine-3'-phosphorothioate
  modified_base 3: mod_base = OTHER; note = 2'-O-methyladenosine-3'-phosphate
  modified_base 4: mod_base = OTHER; note = 2'-O-methylcytidine-3'-phosphate
  modified_base 5: mod_base = OTHER; note = 2'-O-methyluridine-3'-phosphate
  modified_base 6: mod_base = OTHER; note = 2'-deoxy-2'-fluorouridine-3'-phosphate
  modified_base 7: mod_base = OTHER; note = 2'-O-methyluridine-3'-phosphate
  modified_base 8: mod_base = OTHER; note = 2'-deoxy-2'-fluoroadenosine-3'-phosphate
  modified_base 9: mod_base = OTHER; note = 2'-deoxy-2'-fluorouridine-3'-phosphate
  modified_base 10: mod_base = OTHER; note = 2'-O-methyluridine-3'-phosphate
  modified_base 11: mod_base = OTHER; note = 2'-O-methylguanosine-3'-phosphate
  modified_base 12: mod_base = OTHER; note = 2'-O-methyladenosine-3'-phosphate
  modified_base 13: mod_base = OTHER; note = 2'-O-methylguanosine-3'-phosphate
  modified_base 14: mod_base = OTHER; note = 2'-deoxy-2'-fluorouridine-3'-phosphate
  modified_base 15: mod_base = OTHER; note = 2'-O-methyluridine-3'-phosphate
  modified_base 16: mod_base = OTHER; note = 2'-deoxy-2'-fluorouridine-3'-phosphate
  modified_base 17: mod_base = OTHER; note = 2'-O-methylcytidine-3'-phosphate
  modified_base 18: mod_base = OTHER; note = 2'-O-methyluridine-3'-phosphate
  modified_base 19: mod_base = OTHER; note = 2'-O-methylguanosine-3'-phosphate
  modified_base 20: mod_base = OTHER; note = 2'-O-methyluridine-3'-phosphate
  modified_base 21: mod_base = OTHER; note = 2'-O-methylguanosine-3'-phosphorothioate
  modified_base 22: mod_base = OTHER; note = 2'-O-methylcytidine-3'-phosphorothioate
  modified_base 23: mod_base = OTHER; note = 2'-O-methylcytidine
tcactttattgagtttctgtgcc

SEQ ID NO: 15 - RNA, 23 nt, synthetic construct
  source 1..23: mol_type = other RNA
  modified_base 1: mod_base = OTHER; note = 2'-O-methyluridine-3'-phosphorothioate 5'-((trans-dimethyl-1,2-dithiolan-4-yl) phosphate)
  modified_base 2: mod_base = OTHER; note = 2'-deoxy-2'-fluorocytidine-3'-phosphorothioate
  modified_base 3: mod_base = OTHER; note = 2'-O-methyladenosine-3'-phosphate
  modified_base 4: mod_base = OTHER; note = 2'-O-methylcytidine-3'-phosphate
  modified_base 5: mod_base = OTHER; note = 2'-O-methyluridine-3'-phosphate
  modified_base 6: mod_base = OTHER; note = 2'-deoxy-2'-fluorouridine-3'-phosphate
  modified_base 7: mod_base = OTHER; note = 2'-O-methyluridine-3'-phosphate
  modified_base 8: mod_base = OTHER; note = 2'-deoxy-2'-fluoroadenosine-3'-phosphate
  modified_base 9: mod_base = OTHER; note = 2'-deoxy-2'-fluorouridine-3'-phosphate
  modified_base 10: mod_base = OTHER; note = 2'-O-methyluridine-3'-phosphate
  modified_base 11: mod_base = OTHER; note = 2'-O-methylguanosine-3'-phosphate
  modified_base 12: mod_base = OTHER; note = 2'-O-methyladenosine-3'-phosphate
  modified_base 13: mod_base = OTHER; note = 2'-O-methylguanosine-3'-phosphate
  modified_base 14: mod_base = OTHER; note = 2'-deoxy-2'-fluorouridine-3'-phosphate
  modified_base 15: mod_base = OTHER; note = 2'-O-methyluridine-3'-phosphate
  modified_base 16: mod_base = OTHER; note = 2'-deoxy-2'-fluorouridine-3'-phosphate
  modified_base 17: mod_base = OTHER; note = 2'-O-methylcytidine-3'-phosphate
  modified_base 18: mod_base = OTHER; note = 2'-O-methyluridine-3'-phosphate
  modified_base 19: mod_base = OTHER; note = 2'-O-methylguanosine-3'-phosphate
  modified_base 20: mod_base = OTHER; note = 2'-O-methyluridine-3'-phosphate
  modified_base 21: mod_base = OTHER; note = 2'-O-methylguanosine-3'-phosphorothioate
  modified_base 22: mod_base = OTHER; note = 2'-O-methylcytidine-3'-phosphorothioate
  modified_base 23: mod_base = OTHER; note = 2'-O-methylcytidine
tcactttattgagtttctgtgcc

SEQ ID NO: 16 - RNA, 23 nt, synthetic construct
  source 1..23: mol_type = other RNA
  modified_base 1: mod_base = OTHER; note = 2'-O-methyluridine-3'-phosphorothioate 5'-((trans-dimethyl-1,2-dithiolan-4-yl) thiophosphate)
  modified_base 2: mod_base = OTHER; note = 2'-deoxy-2'-fluorocytidine-3'-phosphorothioate
  modified_base 3: mod_base = OTHER; note = 2'-O-methyladenosine-3'-phosphate
  modified_base 4: mod_base = OTHER; note = 2'-O-methylcytidine-3'-phosphate
  modified_base 5: mod_base = OTHER; note = 2'-O-methyluridine-3'-phosphate
  modified_base 6: mod_base = OTHER; note = 2'-deoxy-2'-fluorouridine-3'-phosphate
  modified_base 7: mod_base = OTHER; note = 2'-O-methyluridine-3'-phosphate
  modified_base 8: mod_base = OTHER; note = 2'-deoxy-2'-fluoroadenosine-3'-phosphate
  modified_base 9: mod_base = OTHER; note = 2'-deoxy-2'-fluorouridine-3'-phosphate
  modified_base 10: mod_base = OTHER; note = 2'-O-methyluridine-3'-phosphate
  modified_base 11: mod_base = OTHER; note = 2'-O-methylguanosine-3'-phosphate
  modified_base 12: mod_base = OTHER; note = 2'-O-methyladenosine-3'-phosphate
  modified_base 13: mod_base = OTHER; note = 2'-O-methylguanosine-3'-phosphate
  modified_base 14: mod_base = OTHER; note = 2'-deoxy-2'-fluorouridine-3'-phosphate
  modified_base 15: mod_base = OTHER; note = 2'-O-methyluridine-3'-phosphate
  modified_base 16: mod_base = OTHER; note = 2'-deoxy-2'-fluorouridine-3'-phosphate
  modified_base 17: mod_base = OTHER; note = 2'-O-methylcytidine-3'-phosphate
  modified_base 18: mod_base = OTHER; note = 2'-O-methyluridine-3'-phosphate
  modified_base 19: mod_base = OTHER; note = 2'-O-methylguanosine-3'-phosphate
  modified_base 20: mod_base = OTHER; note = 2'-O-methyluridine-3'-phosphate
  modified_base 21: mod_base = OTHER; note = 2'-O-methylguanosine-3'-phosphorothioate
  modified_base 22: mod_base = OTHER; note = 2'-O-methylcytidine-3'-phosphorothioate
  modified_base 23: mod_base = OTHER; note = 2'-O-methylcytidine
tcactttattgagtttctgtgcc

SEQ ID NO: 17 - RNA, 23 nt, synthetic construct
  source 1..23: mol_type = other RNA
  modified_base 1: mod_base = OTHER; note = 2'-O-methyluridine-3'-phosphorothioate 5'-(cis-3,3,5-trimethyl-1,2-dithiolan-4-yl phosphate)
  modified_base 2: mod_base = OTHER; note = 2'-deoxy-2'-fluorocytidine-3'-phosphorothioate
  modified_base 3: mod_base = OTHER; note = 2'-O-methyladenosine-3'-phosphate
  modified_base 4: mod_base = OTHER; note = 2'-O-methylcytidine-3'-phosphate
  modified_base 5: mod_base = OTHER; note = 2'-O-methyluridine-3'-phosphate
  modified_base 6: mod_base = OTHER; note = 2'-deoxy-2'-fluorouridine-3'-phosphate
  modified_base 7: mod_base = OTHER; note = 2'-O-methyluridine-3'-phosphate
  modified_base 8: mod_base = OTHER; note = 2'-deoxy-2'-fluoroadenosine-3'-phosphate
  modified_base 9: mod_base = OTHER; note = 2'-deoxy-2'-fluorouridine-3'-phosphate
  modified_base 10: mod_base = OTHER; note = 2'-O-methyluridine-3'-phosphate
  modified_base 11: mod_base = OTHER; note = 2'-O-methylguanosine-3'-phosphate
  modified_base 12: mod_base = OTHER; note = 2'-O-methyladenosine-3'-phosphate
  modified_base 13: mod_base = OTHER; note = 2'-O-methylguanosine-3'-phosphate
  modified_base 14: mod_base = OTHER; note = 2'-deoxy-2'-fluorouridine-3'-phosphate
  modified_base 15: mod_base = OTHER; note = 2'-O-methyluridine-3'-phosphate
  modified_base 16: mod_base = OTHER; note = 2'-deoxy-2'-fluorouridine-3'-phosphate
  modified_base 17: mod_base = OTHER; note = 2'-O-methylcytidine-3'-phosphate
  modified_base 18: mod_base = OTHER; note = 2'-O-methyluridine-3'-phosphate
  modified_base 19: mod_base = OTHER; note = 2'-O-methylguanosine-3'-phosphate
  modified_base 20: mod_base = OTHER; note = 2'-O-methyluridine-3'-phosphate
  modified_base 21: mod_base = OTHER; note = 2'-O-methylguanosine-3'-phosphorothioate
  modified_base 22: mod_base = OTHER; note = 2'-O-methylcytidine-3'-phosphorothioate
  modified_base 23: mod_base = OTHER; note = 2'-O-methylcytidine
tcactttattgagtttctgtgcc

SEQ ID NO: 18 - RNA, 23 nt, synthetic construct
  source 1..23: mol_type = other RNA
  modified_base 1: mod_base = OTHER; note = 2'-O-methyluridine-3'-phosphorothioate 5'-(cis-3,3,5-trimethyl-1,2-dithiolan-4-yl thiophosphate)
  modified_base 2: mod_base = OTHER; note = 2'-deoxy-2'-fluorocytidine-3'-phosphorothioate
  modified_base 3: mod_base = OTHER; note = 2'-O-methyladenosine-3'-phosphate
  modified_base 4: mod_base = OTHER; note = 2'-O-methylcytidine-3'-phosphate
  modified_base 5: mod_base = OTHER; note = 2'-O-methyluridine-3'-phosphate
  modified_base 6: mod_base = OTHER; note = 2'-deoxy-2'-fluorouridine-3'-phosphate
  modified_base 7: mod_base = OTHER; note = 2'-O-methyluridine-3'-phosphate
  modified_base 8: mod_base = OTHER; note = 2'-deoxy-2'-fluoroadenosine-3'-phosphate
  modified_base 9: mod_base = OTHER; note = 2'-deoxy-2'-fluorouridine-3'-phosphate
  modified_base 10: mod_base = OTHER; note = 2'-O-methyluridine-3'-phosphate
  modified_base 11: mod_base = OTHER; note = 2'-O-methylguanosine-3'-phosphate
  modified_base 12: mod_base = OTHER; note = 2'-O-methyladenosine-3'-phosphate
  modified_base 13: mod_base = OTHER; note = 2'-O-methylguanosine-3'-phosphate
  modified_base 14: mod_base = OTHER; note = 2'-deoxy-2'-fluorouridine-3'-phosphate
  modified_base 15: mod_base = OTHER; note = 2'-O-methyluridine-3'-phosphate
  modified_base 16: mod_base = OTHER; note = 2'-deoxy-2'-fluorouridine-3'-phosphate
  modified_base 17: mod_base = OTHER; note = 2'-O-methylcytidine-3'-phosphate
  modified_base 18: mod_base = OTHER; note = 2'-O-methyluridine-3'-phosphate
  modified_base 19: mod_base = OTHER; note = 2'-O-methylguanosine-3'-phosphate
  modified_base 20: mod_base = OTHER; note = 2'-O-methyluridine-3'-phosphate
  modified_base 21: mod_base = OTHER; note = 2'-O-methylguanosine-3'-phosphorothioate
  modified_base 22: mod_base = OTHER; note = 2'-O-methylcytidine-3'-phosphorothioate
  modified_base 23: mod_base = OTHER; note = 2'-O-methylcytidine
tcactttattgagtttctgtgcc

SEQ ID NO: 19 - RNA, 23 nt, synthetic construct
  source 1..23: mol_type = other RNA
  modified_base 1: mod_base = OTHER; note = 2'-O-methyluridine-3'-phosphorothioate 5'-(3,3,5,5-tetramethyl-1,2-dithiolan-4-yl phosphate)
  modified_base 2: mod_base = OTHER; note = 2'-deoxy-2'-fluorocytidine-3'-phosphorothioate
  modified_base 3: mod_base = OTHER; note = 2'-O-methyladenosine-3'-phosphate
  modified_base 4: mod_base = OTHER; note = 2'-O-methylcytidine-3'-phosphate
  modified_base 5: mod_base = OTHER; note = 2'-O-methyluridine-3'-phosphate
  modified_base 6: mod_base = OTHER; note = 2'-deoxy-2'-fluorouridine-3'-phosphate
  modified_base 7: mod_base = OTHER; note = 2'-O-methyluridine-3'-phosphate
  modified_base 8: mod_base = OTHER; note = 2'-deoxy-2'-fluoroadenosine-3'-phosphate
  modified_base 9: mod_base = OTHER; note = 2'-deoxy-2'-fluorouridine-3'-phosphate
  modified_base 10: mod_base = OTHER; note = 2'-O-methyluridine-3'-phosphate
  modified_base 11: mod_base = OTHER; note = 2'-O-methylguanosine-3'-phosphate
  modified_base 12: mod_base = OTHER; note = 2'-O-methyladenosine-3'-phosphate
  modified_base 13: mod_base = OTHER; note = 2'-O-methylguanosine-3'-phosphate
  modified_base 14: mod_base = OTHER; note = 2'-deoxy-2'-fluorouridine-3'-phosphate
  modified_base 15: mod_base = OTHER; note = 2'-O-methyluridine-3'-phosphate
  modified_base 16: mod_base = OTHER; note = 2'-deoxy-2'-fluorouridine-3'-phosphate
  modified_base 17: mod_base = OTHER; note = 2'-O-methylcytidine-3'-phosphate
  modified_base 18: mod_base = OTHER; note = 2'-O-methyluridine-3'-phosphate
  modified_base 19: mod_base = OTHER; note = 2'-O-methylguanosine-3'-phosphate
  modified_base 20: mod_base = OTHER; note = 2'-O-methyluridine-3'-phosphate
  modified_base 21: mod_base = OTHER; note = 2'-O-methylguanosine-3'-phosphorothioate
  modified_base 22: mod_base = OTHER; note = 2'-O-methylcytidine-3'-phosphorothioate
  modified_base 23: mod_base = OTHER; note = 2'-O-methylcytidine
tcactttattgagtttctgtgcc

SEQ ID NO: 20 - RNA, 23 nt, synthetic construct
  source 1..23: mol_type = other RNA
  modified_base 1: mod_base = OTHER; note = 2'-O-methyluridine-3'-phosphorothioate 5'-(3,3,5,5-tetramethyl-1,2-dithiolan-4-yl thiophosphate)
  modified_base 2: mod_base = OTHER; note = 2'-deoxy-2'-fluorocytidine-3'-phosphorothioate
  modified_base 3: mod_base = OTHER; note = 2'-O-methyladenosine-3'-phosphate
  modified_base 4: mod_base = OTHER; note = 2'-O-methylcytidine-3'-phosphate
  modified_base 5: mod_base = OTHER; note = 2'-O-methyluridine-3'-phosphate
  modified_base 6: mod_base = OTHER; note = 2'-deoxy-2'-fluorouridine-3'-phosphate
  modified_base 7: mod_base = OTHER; note = 2'-O-methyluridine-3'-phosphate
  modified_base 8: mod_base = OTHER; note = 2'-deoxy-2'-fluoroadenosine-3'-phosphate
  modified_base 9: mod_base = OTHER; note = 2'-deoxy-2'-fluorouridine-3'-phosphate
  modified_base 10: mod_base = OTHER; note = 2'-O-methyluridine-3'-phosphate
  modified_base 11: mod_base = OTHER; note = 2'-O-methylguanosine-3'-phosphate
  modified_base 12: mod_base = OTHER; note = 2'-O-methyladenosine-3'-phosphate
  modified_base 13: mod_base = OTHER; note = 2'-O-methylguanosine-3'-phosphate
  modified_base 14: mod_base = OTHER; note = 2'-deoxy-2'-fluorouridine-3'-phosphate
  modified_base 15: mod_base = OTHER; note = 2'-O-methyluridine-3'-phosphate
  modified_base 16: mod_base = OTHER; note = 2'-deoxy-2'-fluorouridine-3'-phosphate
  modified_base 17: mod_base = OTHER; note = 2'-O-methylcytidine-3'-phosphate
  modified_base 18: mod_base = OTHER; note = 2'-O-methyluridine-3'-phosphate
  modified_base 19: mod_base = OTHER; note = 2'-O-methylguanosine-3'-phosphate
  modified_base 20: mod_base = OTHER; note = 2'-O-methyluridine-3'-phosphate
  modified_base 21: mod_base = OTHER; note = 2'-O-methylguanosine-3'-phosphorothioate
  modified_base 22: mod_base = OTHER; note = 2'-O-methylcytidine-3'-phosphorothioate
  modified_base 23: mod_base = OTHER; note = 2'-O-methylcytidine
tcactttattgagtttctgtgcc

SEQ ID NO: 21 - RNA, 23 nt, synthetic construct
  source 1..23: mol_type = other RNA
  modified_base 1: mod_base = OTHER; note = 2'-O-methyluridine-3'-phosphate 5'-(trans-2-methoxycyclohex-1-yl thiophosphate)
  modified_base 2: mod_base = OTHER; note = 2'-deoxy-2'-fluorocytidine-3'-phosphate
  modified_base 3: mod_base = OTHER; note = 2'-O-methyladenosine-3'-phosphate
  modified_base 4: mod_base = OTHER; note = 2'-O-methylcytidine-3'-phosphate
  modified_base 5: mod_base = OTHER; note = 2'-O-methyluridine-3'-phosphate
  modified_base 6: mod_base = OTHER; note = 2'-deoxy-2'-fluorouridine-3'-phosphate
  modified_base 7: mod_base = OTHER; note = 2'-O-methyluridine-3'-phosphate
  modified_base 8: mod_base = OTHER; note = 2'-deoxy-2'-fluoroadenosine-3'-phosphate
  modified_base 9: mod_base = OTHER; note = 2'-deoxy-2'-fluorouridine-3'-phosphate
  modified_base 10: mod_base = OTHER; note = 2'-O-methyluridine-3'-phosphate
  modified_base 11: mod_base = OTHER; note = 2'-O-methylguanosine-3'-phosphate
  modified_base 12: mod_base = OTHER; note = 2'-O-methyladenosine-3'-phosphate
  modified_base 13: mod_base = OTHER; note = 2'-O-methylguanosine-3'-phosphate
  modified_base 14: mod_base = OTHER; note = 2'-deoxy-2'-fluorouridine-3'-phosphate
  modified_base 15: mod_base = OTHER; note = 2'-O-methyluridine-3'-phosphate
  modified_base 16: mod_base = OTHER; note = 2'-deoxy-2'-fluorouridine-3'-phosphate
  modified_base 17: mod_base = OTHER; note = 2'-O-methylcytidine-3'-phosphate
  modified_base 18: mod_base = OTHER; note = 2'-O-methyluridine-3'-phosphate
  modified_base 19: mod_base = OTHER; note = 2'-O-methylguanosine-3'-phosphate
  modified_base 20: mod_base = OTHER; note = 2'-O-methyluridine-3'-phosphate
  modified_base 21: mod_base = OTHER; note = 2'-O-methylguanosine-3'-phosphorothioate
  modified_base 22: mod_base = OTHER; note = 2'-O-methylcytidine-3'-phosphorothioate
  modified_base 23: mod_base = OTHER; note = 2'-O-methylcytidine
tcactttattgagtttctgtgcc

SEQ ID NO: 22 - RNA, 23 nt, synthetic construct
  source 1..23: mol_type = other RNA
  modified_base 1: mod_base = OTHER; note = 2'-O-methyluridine-3'-phosphate 5'-(trans-5-hydroxy-1,2-dithian-4-yl thiophosphate)
  modified_base 2: mod_base = OTHER; note = 2'-deoxy-2'-fluorocytidine-3'-phosphate
  modified_base 3: mod_base = OTHER; note = 2'-O-methyladenosine-3'-phosphate
  modified_base 4: mod_base = OTHER; note = 2'-O-methylcytidine-3'-phosphate
  modified_base 5: mod_base = OTHER; note = 2'-O-methyluridine-3'-phosphate
  modified_base 6: mod_base = OTHER; note = 2'-deoxy-2'-fluorouridine-3'-phosphate
  modified_base 7: mod_base = OTHER; note = 2'-O-methyluridine-3'-phosphate
  modified_base 8: mod_base = OTHER; note = 2'-deoxy-2'-fluoroadenosine-3'-phosphate
  modified_base 9: mod_base = OTHER; note = 2'-deoxy-2'-fluorouridine-3'-phosphate
  modified_base 10: mod_base = OTHER; note = 2'-O-methyluridine-3'-phosphate
  modified_base 11: mod_base = OTHER; note = 2'-O-methylguanosine-3'-phosphate
  modified_base 12: mod_base = OTHER; note = 2'-O-methyladenosine-3'-phosphate
  modified_base 13: mod_base = OTHER; note = 2'-O-methylguanosine-3'-phosphate
  modified_base 14: mod_base = OTHER; note = 2'-deoxy-2'-fluorouridine-3'-phosphate
  modified_base 15: mod_base = OTHER; note = 2'-O-methyluridine-3'-phosphate
  modified_base 16: mod_base = OTHER; note = 2'-deoxy-2'-fluorouridine-3'-phosphate
  modified_base 17: mod_base = OTHER; note = 2'-O-methylcytidine-3'-phosphate
  modified_base 18: mod_base = OTHER; note = 2'-O-methyluridine-3'-phosphate
  modified_base 19: mod_base = OTHER; note = 2'-O-methylguanosine-3'-phosphate
  modified_base 20: mod_base = OTHER; note = 2'-O-methyluridine-3'-phosphate
  modified_base 21: mod_base = OTHER; note = 2'-O-methylguanosine-3'-phosphorothioate
  modified_base 22: mod_base = OTHER; note = 2'-O-methylcytidine-3'-phosphorothioate
  modified_base 23: mod_base = OTHER; note = 2'-O-methylcytidine
tcactttattgagtttctgtgcc

SEQ ID NO: 23 - RNA, 23 nt, synthetic construct
  source 1..23: mol_type = other RNA
  modified_base 1: mod_base = OTHER; note = 2'-O-methyluridine-3'-phosphate 5'-(cis-3,3,5-trimethyl-1,2-dithiolan-4-yl thiophosphate)
  modified_base 2: mod_base = OTHER; note = 2'-deoxy-2'-fluorocytidine-3'-phosphate
  modified_base 3: mod_base = OTHER; note = 2'-O-methyladenosine-3'-phosphate
  modified_base 4: mod_base = OTHER; note = 2'-O-methylcytidine-3'-phosphate
  modified_base 5: mod_base = OTHER; note = 2'-O-methyluridine-3'-phosphate
  modified_base 6: mod_base = OTHER; note = 2'-deoxy-2'-fluorouridine-3'-phosphate
  modified_base 7: mod_base = OTHER; note = 2'-O-methyluridine-3'-phosphate
  modified_base 8: mod_base = OTHER; note = 2'-deoxy-2'-fluoroadenosine-3'-phosphate
  modified_base 9: mod_base = OTHER; note = 2'-deoxy-2'-fluorouridine-3'-phosphate
  modified_base 10: mod_base = OTHER; note = 2'-O-methyluridine-3'-phosphate
  modified_base 11: mod_base = OTHER; note = 2'-O-methylguanosine-3'-phosphate
  modified_base 12: mod_base = OTHER; note = 2'-O-methyladenosine-3'-phosphate
  modified_base 13: mod_base = OTHER; note = 2'-O-methylguanosine-3'-phosphate
  modified_base 14: mod_base = OTHER; note = 2'-deoxy-2'-fluorouridine-3'-phosphate
  modified_base 15: mod_base = OTHER; note = 2'-O-methyluridine-3'-phosphate
  modified_base 16: mod_base = OTHER; note = 2'-deoxy-2'-fluorouridine-3'-phosphate
  modified_base 17: mod_base = OTHER; note = 2'-O-methylcytidine-3'-phosphate
  modified_base 18: mod_base = OTHER; note = 2'-O-methyluridine-3'-phosphate
  modified_base 19: mod_base = OTHER; note = 2'-O-methylguanosine-3'-phosphate
  modified_base 20: mod_base = OTHER; note = 2'-O-methyluridine-3'-phosphate
  modified_base 21: mod_base = OTHER; note = 2'-O-methylguanosine-3'-phosphorothioate
  modified_base 22: mod_base = OTHER; note = 2'-O-methylcytidine-3'-phosphorothioate
  modified_base 23: mod_base = OTHER; note = 2'-O-methylcytidine
tcactttattgagtttctgtgcc

SEQ ID NO: 24 - RNA, 23 nt, synthetic construct
  source 1..23: mol_type = other RNA
  modified_base 1: mod_base = OTHER; note = 2'-O-methyluridine-3'-phosphate 5'-(3,3,5,5-tetramethyl-1,2-dithiolan-4-yl thiophosphate)
  modified_base 2: mod_base = OTHER; note = 2'-deoxy-2'-fluorocytidine-3'-phosphate
  modified_base 3: mod_base = OTHER; note = 2'-O-methyladenosine-3'-phosphate
  modified_base 4: mod_base = OTHER; note = 2'-O-methylcytidine-3'-phosphate
  modified_base 5: mod_base = OTHER; note = 2'-O-methyluridine-3'-phosphate
  modified_base 6: mod_base = OTHER; note = 2'-deoxy-2'-fluorouridine-3'-phosphate
  modified_base 7: mod_base = OTHER; note = 2'-O-methyluridine-3'-phosphate
  modified_base 8: mod_base = OTHER; note = 2'-deoxy-2'-fluoroadenosine-3'-phosphate
  modified_base 9: mod_base = OTHER; note = 2'-deoxy-2'-fluorouridine-3'-phosphate
  modified_base 10: mod_base = OTHER; note = 2'-O-methyluridine-3'-phosphate
  modified_base 11: mod_base = OTHER; note = 2'-O-methylguanosine-3'-phosphate
  modified_base 12: mod_base = OTHER; note = 2'-O-methyladenosine-3'-phosphate
  modified_base 13: mod_base = OTHER; note = 2'-O-methylguanosine-3'-phosphate
  modified_base 14: mod_base = OTHER; note = 2'-deoxy-2'-fluorouridine-3'-phosphate
  modified_base 15: mod_base = OTHER; note = 2'-O-methyluridine-3'-phosphate
  modified_base 16: mod_base = OTHER; note = 2'-deoxy-2'-fluorouridine-3'-phosphate
  modified_base 17: mod_base = OTHER; note = 2'-O-methylcytidine-3'-phosphate
  modified_base 18: mod_base = OTHER; note = 2'-O-methyluridine-3'-phosphate
  modified_base 19: mod_base = OTHER; note = 2'-O-methylguanosine-3'-phosphate
  modified_base 20: mod_base = OTHER; note = 2'-O-methyluridine-3'-phosphate
  modified_base 21: mod_base = OTHER; note = 2'-O-methylguanosine-3'-phosphorothioate
  modified_base 22: mod_base = OTHER; note = 2'-O-methylcytidine-3'-phosphorothioate
  modified_base 23: mod_base = OTHER; note = 2'-O-methylcytidine
tcactttattgagtttctgtgcc

SEQ ID NO: 25 - RNA, 21 nt, synthetic construct
  source 1..21: mol_type = other RNA
  modified_base 1: mod_base = OTHER; note = 2'-O-methylcytidine-3'-phosphorothioate
  modified_base 2: mod_base = OTHER; note = 2'-O-methyladenosine-3'-phosphorothioate
  modified_base 3: mod_base = OTHER; note = 2'-O-methylcytidine-3'-phosphate
  modified_base 4: mod_base = OTHER; note = 2'-O-methyladenosine-3'-phosphate
  modified_base 5: mod_base = OTHER; note = 2'-O-methylguanosine-3'-phosphate
  modified_base 6: mod_base = OTHER; note = 2'-O-methyladenosine-3'-phosphate
  modified_base 7: mod_base = OTHER; note = 2'-deoxy-2'-fluoroadenosine-3'-phosphate
  modified_base 8: mod_base = OTHER; note = 2'-O-methyladenosine-3'-phosphate
  modified_base 9: mod_base = OTHER; note = 2'-deoxy-2'-fluorocytidine-3'-phosphate
  modified_base 10: mod_base = OTHER; note = 2'-deoxy-2'-fluorouridine-3'-phosphate
  modified_base 11: mod_base = OTHER; note = 2'-deoxy-2'-fluorocytidine-3'-phosphate
  modified_base 12: mod_base = OTHER; note = 2'-O-methyladenosine-3'-phosphate
  modified_base 13: mod_base = OTHER; note = 2'-O-methyladenosine-3'-phosphate
  modified_base 14: mod_base = OTHER; note = 2'-O-methyluridine-3'-phosphate
  modified_base 15: mod_base = OTHER; note = 2'-O-methyladenosine-3'-phosphate
  modified_base 16: mod_base = OTHER; note = 2'-O-methyladenosine-3'-phosphate
  modified_base 17: mod_base = OTHER; note = 2'-O-methyladenosine-3'-phosphate
  modified_base 18: mod_base = OTHER; note = 2'-O-methylguanosine-3'-phosphate
  modified_base 19: mod_base = OTHER; note = 2'-O-methyluridine-3'-phosphate
  modified_base 20: mod_base = OTHER; note = 2'-O-methylguanosine-3'-phosphate
  modified_base 21: mod_base = OTHER; note = 2'-O-methyladenosine-3'-phosphate ((2S,4R)-1-[29-[[2-(acetylamino)-2-deoxy-beta-D-galactopyra nosyl]oxy]-14,14-bis[[3-[[3-[[5-[[2-(acetylamino)-2-deoxy-b eta-D-galactopyranosyl]oxy]-1-oxopentyl]amino]propyl]amino] -3-oxopropoxy]methyl]-1,12,19,25-tetraoxo-16-oxa-13,20,24-t riazanonacos-1-yl]-4-hydroxy-2-pyrrolidinyl)methyl ester
cacagaaactcaataaagtga

SEQ ID NO: 26 - RNA, 23 nt, synthetic construct
  source 1..23: mol_type = other RNA
  modified_base 1: mod_base = OTHER; note = 2'-O-methyluridine-3'-phosphorothioate
  modified_base 2: mod_base = OTHER; note = 2'-deoxy-2'-fluorocytidine-3'-phosphorothioate
  modified_base 3: mod_base = OTHER; note = 2'-O-methyladenosine-3'-phosphate
  modified_base 4: mod_base = OTHER; note = 2'-O-methylcytidine-3'-phosphate
  modified_base 5: mod_base = OTHER; note = 2'-O-methyluridine-3'-phosphate
  modified_base 6: mod_base = OTHER; note = 2'-deoxy-2'-fluorouridine-3'-phosphate
  modified_base 7: mod_base = OTHER; note = 2'-O-methyluridine-3'-phosphate
  modified_base 8: mod_base = OTHER; note = 2'-deoxy-2'-fluoroadenosine-3'-phosphate
  modified_base 9: mod_base = OTHER; note = 2'-deoxy-2'-fluorouridine-3'-phosphate
  modified_base 10: mod_base = OTHER; note = 2'-O-methyluridine-3'-phosphate
  modified_base 11: mod_base = OTHER; note = 2'-O-methylguanosine-3'-phosphate
  modified_base 12: mod_base = OTHER; note = 2'-O-methyladenosine-3'-phosphate
  modified_base 13: mod_base = OTHER; note = 2'-O-methylguanosine-3'-phosphate
  modified_base 14: mod_base = OTHER; note = 2'-deoxy-2'-fluorouridine-3'-phosphate
  modified_base 15: mod_base = OTHER; note = 2'-O-methyluridine-3'-phosphate
  modified_base 16: mod_base = OTHER; note = 2'-deoxy-2'-fluorouridine-3'-phosphate
  modified_base 17: mod_base = OTHER; note = 2'-O-methylcytidine-3'-phosphate
  modified_base 18: mod_base = OTHER; note = 2'-O-methyluridine-3'-phosphate
  modified_base 19: mod_base = OTHER; note = 2'-O-methylguanosine-3'-phosphate
  modified_base 20: mod_base = OTHER; note = 2'-O-methyluridine-3'-phosphate
  modified_base 21: mod_base = OTHER; note = 2'-O-methylguanosine-3'-phosphorothioate
  modified_base 22: mod_base = OTHER; note = 2'-O-methylcytidine-3'-phosphorothioate
  modified_base 23: mod_base = OTHER; note = 2'-O-methylcytidine
tcactttattgagtttctgtgcc

SEQ ID NO: 27 - RNA, 21 nt, synthetic construct
  source 1..21: mol_type = other RNA
  modified_base 1: mod_base = OTHER; note = 2'-O-methylcytidine-3'-phosphorothioate
  modified_base 2: mod_base = OTHER; note = 2'-O-methyladenosine-3'-phosphorothioate
  modified_base 3: mod_base = OTHER; note = 2'-O-methylcytidine-3'-phosphate
  modified_base 4: mod_base = OTHER; note = 2'-O-methyladenosine-3'-phosphate
  modified_base 5: mod_base = OTHER; note = 2'-O-methylguanosine-3'-phosphate
  modified_base 6: mod_base = OTHER; note = 2'-O-methyladenosine-3'-phosphate
  modified_base 7: mod_base = OTHER; note = 2'-deoxy-2'-fluoroadenosine-3'-phosphate
  modified_base 8: mod_base = OTHER; note = 2'-O-methyladenosine-3'-phosphate
  modified_base 9: mod_base = OTHER; note = 2'-deoxy-2'-fluorocytidine-3'-phosphate
  modified_base 10: mod_base = OTHER; note = 2'-deoxy-2'-fluorouridine-3'-phosphate
  modified_base 11: mod_base = OTHER; note = 2'-deoxy-2'-fluorocytidine-3'-phosphate
  modified_base 12: mod_base = OTHER; note = 2'-O-methyladenosine-3'-phosphate
  modified_base 13: mod_base = OTHER; note = 2'-O-methyladenosine-3'-phosphate
  modified_base 14: mod_base = OTHER; note = 2'-O-methyluridine-3'-phosphate
  modified_base 15: mod_base = OTHER; note = 2'-O-methyladenosine-3'-phosphate
  modified_base 16: mod_base = OTHER; note = 2'-O-methyladenosine-3'-phosphate
  modified_base 17: mod_base = OTHER; note = 2'-O-methyladenosine-3'-phosphate
  modified_base 18: mod_base = OTHER; note = 2'-O-methylguanosine-3'-phosphate
  modified_base 19: mod_base = OTHER; note = 2'-O-methyluridine-3'-phosphate
  modified_base 20: mod_base = OTHER; note = 2'-O-methylguanosine-3'-phosphate
  modified_base 21: mod_base = OTHER; note = 2'-O-methyladenosine-3'-phosphate ((2S,4R)-1-[29-[[2-(acetylamino)-2-deoxy-beta-D-galactopyra nosyl]oxy]-14,14-bis[[3-[[3-[[5-[[2-(acetylamino)-2-deoxy-b eta-D-galactopyranosyl]oxy]-1-oxopentyl]amino]propyl]amino] -3-oxopropoxy]methyl]-1,12,19,25-tetraoxo-16-oxa-13,20,24-t riazanonacos-1-yl]-4-hydroxy-2-pyrrolidinyl)methyl ester
cacagaaactcaataaagtga

SEQ ID NO: 28 - RNA, 23 nt, synthetic construct
  source 1..23: mol_type = other RNA
  modified_base 1: mod_base = OTHER; note = 2'-O-methyluridine-3'-phosphate 5'-(E)-Vinylphosphonate
  modified_base 2: mod_base = OTHER; note = 2'-deoxy-2'-fluorocytidine-3'-phosphate
  modified_base 3: mod_base = OTHER; note = 2'-O-methyladenosine-3'-phosphate
  modified_base 4: mod_base = OTHER; note = 2'-O-methylcytidine-3'-phosphate
  modified_base 5: mod_base = OTHER; note = 2'-O-methyluridine-3'-phosphate
  modified_base 6: mod_base = OTHER; note = 2'-deoxy-2'-fluorouridine-3'-phosphate
  modified_base 7: mod_base = OTHER; note = 2'-O-methyluridine-3'-phosphate
  modified_base 8: mod_base = OTHER; note = 2'-deoxy-2'-fluoroadenosine-3'-phosphate
  modified_base 9: mod_base = OTHER; note = 2'-deoxy-2'-fluorouridine-3'-phosphate
  modified_base 10: mod_base = OTHER; note = 2'-O-methyluridine-3'-phosphate
  modified_base 11: mod_base = OTHER; note = 2'-O-methylguanosine-3'-phosphate
  modified_base 12: mod_base = OTHER; note = 2'-O-methyladenosine-3'-phosphate
  modified_base 13: mod_base = OTHER; note = 2'-O-methylguanosine-3'-phosphate
  modified_base 14: mod_base = OTHER; note = 2'-deoxy-2'-fluorouridine-3'-phosphate
  modified_base 15: mod_base = OTHER; note = 2'-O-methyluridine-3'-phosphate
  modified_base 16: mod_base = OTHER; note = 2'-deoxy-2'-fluorouridine-3'-phosphate
  modified_base 17: mod_base = OTHER; note = 2'-O-methylcytidine-3'-phosphate
  modified_base 18: mod_base = OTHER; note = 2'-O-methyluridine-3'-phosphate
  modified_base 19: mod_base = OTHER; note = 2'-O-methylguanosine-3'-phosphate
  modified_base 20: mod_base = OTHER; note = 2'-O-methyluridine-3'-phosphate
  modified_base 21: mod_base = OTHER; note = 2'-O-methylguanosine-3'-phosphorothioate
  modified_base 22: mod_base = OTHER; note = 2'-O-methylcytidine-3'-phosphorothioate
  modified_base 23: mod_base = OTHER; note = 2'-O-methylcytidine
tcactttattgagtttctgtgcc

SEQ ID NO: 29 - RNA, 21 nt, synthetic construct
  source 1..21: mol_type = other RNA
  modified_base 1: mod_base = OTHER; note = 2'-O-methylcytidine-3'-phosphorothioate
  modified_base 2: mod_base = OTHER; note = 2'-O-methyladenosine-3'-phosphorothioate
  modified_base 3: mod_base = OTHER; note = 2'-O-methylcytidine-3'-phosphate
  modified_base 4: mod_base = OTHER; note = 2'-O-methyladenosine-3'-phosphate
  modified_base 5: mod_base = OTHER; note = 2'-O-methylguanosine-3'-phosphate
  modified_base 6: mod_base = OTHER; note = 2'-O-methyladenosine-3'-phosphate
  modified_base 7: mod_base = OTHER; note = 2'-deoxy-2'-fluoroadenosine-3'-phosphate
  modified_base 8: mod_base = OTHER; note = 2'-O-methyladenosine-3'-phosphate
  modified_base 9: mod_base = OTHER; note = 2'-deoxy-2'-fluorocytidine-3'-phosphate
  modified_base 10: mod_base = OTHER; note = 2'-deoxy-2'-fluorouridine-3'-phosphate
  modified_base 11: mod_base = OTHER; note = 2'-deoxy-2'-fluorocytidine-3'-phosphate
  modified_base 12: mod_base = OTHER; note = 2'-O-methyladenosine-3'-phosphate
  modified_base 13: mod_base = OTHER; note = 2'-O-methyladenosine-3'-phosphate
  modified_base 14: mod_base = OTHER; note = 2'-O-methyluridine-3'-phosphate
  modified_base 15: mod_base = OTHER; note = 2'-O-methyladenosine-3'-phosphate
  modified_base 16: mod_base = OTHER; note = 2'-O-methyladenosine-3'-phosphate
  modified_base 17: mod_base = OTHER; note = 2'-O-methyladenosine-3'-phosphate
  modified_base 18: mod_base = OTHER; note = 2'-O-methylguanosine-3'-phosphate
  modified_base 19: mod_base = OTHER; note = 2'-O-methyluridine-3'-phosphate
  modified_base 20: mod_base = OTHER; note = 2'-O-methylguanosine-3'-phosphate
  modified_base 21: mod_base = OTHER; note = 2'-O-methyladenosine-3'-phosphate ((2S,4R)-1-[29-[[2-(acetylamino)-2-deoxy-beta-D-galactopyra nosyl]oxy]-14,14-bis[[3-[[3-[[5-[[2-(acetylamino)-2-deoxy-b eta-D-galactopyranosyl]oxy]-1-oxopentyl]amino]propyl]amino] -3-oxopropoxy]methyl]-1,12,19,25-tetraoxo-16-oxa-13,20,24-t riazanonacos-1-yl]-4-hydroxy-2-pyrrolidinyl)methyl ester
cacagaaactcaataaagtga

SEQ ID NO: 30 - RNA, 23 nt, synthetic construct
  source 1..23: mol_type = other RNA
  modified_base 1: mod_base = OTHER; note = 2'-O-methyluridine-3'-phosphate 5'-(trans-5-methoxy-1,2-dithian-4-yl thiophosphate)
  modified_base 2: mod_base = OTHER; note = 2'-deoxy-2'-fluorocytidine-3'-phosphate
  modified_base 3: mod_base = OTHER; note = 2'-O-methyladenosine-3'-phosphate
  modified_base 4: mod_base = OTHER; note = 2'-O-methylcytidine-3'-phosphate
  modified_base 5: mod_base = OTHER; note = 2'-O-methyluridine-3'-phosphate
  modified_base 6: mod_base = OTHER; note = 2'-deoxy-2'-fluorouridine-3'-phosphate
  modified_base 7: mod_base = OTHER; note = 2'-O-methyluridine-3'-phosphate
  modified_base 8: mod_base = OTHER; note = 2'-deoxy-2'-fluoroadenosine-3'-phosphate
  modified_base 9: mod_base = OTHER; note = 2'-deoxy-2'-fluorouridine-3'-phosphate
  modified_base 10: mod_base = OTHER; note = 2'-O-methyluridine-3'-phosphate
  modified_base 11: mod_base = OTHER; note = 2'-O-methylguanosine-3'-phosphate
  modified_base 12: mod_base = OTHER; note = 2'-O-methyladenosine-3'-phosphate
  modified_base 13: mod_base = OTHER; note = 2'-O-methylguanosine-3'-phosphate
  modified_base 14: mod_base = OTHER; note = 2'-deoxy-2'-fluorouridine-3'-phosphate
  modified_base 15: mod_base = OTHER; note = 2'-O-methyluridine-3'-phosphate
  modified_base 16: mod_base = OTHER; note = 2'-deoxy-2'-fluorouridine-3'-phosphate
  modified_base 17: mod_base = OTHER; note = 2'-O-methylcytidine-3'-phosphate
  modified_base 18: mod_base = OTHER; note = 2'-O-methyluridine-3'-phosphate
  modified_base 19: mod_base = OTHER; note = 2'-O-methylguanosine-3'-phosphate
  modified_base 20: mod_base = OTHER; note = 2'-O-methyluridine-3'-phosphate
  modified_base 21: mod_base = OTHER; note = 2'-O-methylguanosine-3'-phosphorothioate
  modified_base 22: mod_base = OTHER; note = 2'-O-methylcytidine-3'-phosphorothioate
  modified_base 23: mod_base = OTHER; note = 2'-O-methylcytidine
tcactttattgagtttctgtgcc

SEQ ID NO: 31 - RNA, 21 nt, synthetic construct
  source 1..21: mol_type = other RNA
  modified_base 1: mod_base = OTHER; note = 2'-O-methylcytidine-3'-phosphorothioate
  modified_base 2: mod_base = OTHER; note = 2'-O-methyladenosine-3'-phosphorothioate
  modified_base 3: mod_base = OTHER; note = 2'-O-methylcytidine-3'-phosphate
  modified_base 4: mod_base = OTHER; note = 2'-O-methyladenosine-3'-phosphate
  modified_base 5: mod_base = OTHER; note = 2'-O-methylguanosine-3'-phosphate
  modified_base 6: mod_base = OTHER; note = 2'-O-methyladenosine-3'-phosphate
  modified_base 7: mod_base = OTHER; note = 2'-deoxy-2'-fluoroadenosine-3'-phosphate
  modified_base 8: mod_base = OTHER; note = 2'-O-methyladenosine-3'-phosphate
  modified_base 9: mod_base = OTHER; note = 2'-deoxy-2'-fluorocytidine-3'-phosphate
  modified_base 10: mod_base = OTHER; note = 2'-deoxy-2'-fluorouridine-3'-phosphate
  modified_base 11: mod_base = OTHER; note = 2'-deoxy-2'-fluorocytidine-3'-phosphate
  modified_base 12: mod_base = OTHER; note = 2'-O-methyladenosine-3'-phosphate
  modified_base 13: mod_base = OTHER; note = 2'-O-methyladenosine-3'-phosphate
  modified_base 14: mod_base = OTHER; note = 2'-O-methyluridine-3'-phosphate
  modified_base 15: mod_base = OTHER; note = 2'-O-methyladenosine-3'-phosphate
  modified_base 16: mod_base = OTHER; note = 2'-O-methyladenosine-3'-phosphate
  modified_base 17: mod_base = OTHER; note = 2'-O-methyladenosine-3'-phosphate
  modified_base 18: mod_base = OTHER; note = 2'-O-methylguanosine-3'-phosphate
  modified_base 19: mod_base = OTHER; note = 2'-O-methyluridine-3'-phosphate
  modified_base 20: mod_base = OTHER; note = 2'-O-methylguanosine-3'-phosphate
  modified_base 21: mod_base = OTHER; note = 2'-O-methyladenosine-3'-phosphate ((2S,4R)-1-[29-[[2-(acetylamino)-2-deoxy-beta-D-galactopyra nosyl]oxy]-14,14-bis[[3-[[3-[[5-[[2-(acetylamino)-2-deoxy-b eta-D-galactopyranosyl]oxy]-1-oxopentyl]amino]propyl]amino] -3-oxopropoxy]methyl]-1,12,19,25-tetraoxo-16-oxa-13,20,24-t riazanonacos-1-yl]-4-hydroxy-2-pyrrolidinyl)methyl ester
cacagaaactcaataaagtga

SEQ ID NO: 32 - RNA, 23 nt, synthetic construct
  source 1..23: mol_type = other RNA
  modified_base 1: mod_base = OTHER; note = 2'-O-methyluridine-3'-phosphorothioate 5'-(trans-2-methoxycyclohex-1-yl phosphate)
  modified_base 2: mod_base = OTHER; note = 2'-deoxy-2'-fluorocytidine-3'-phosphorothioate
  modified_base 3: mod_base = OTHER; note = 2'-O-methyladenosine-3'-phosphate
  modified_base 4: mod_base = OTHER; note = 2'-O-methylcytidine-3'-phosphate
  modified_base 5: mod_base = OTHER; note = 2'-O-methyluridine-3'-phosphate
  modified_base 6: mod_base = OTHER; note = 2'-deoxy-2'-fluorouridine-3'-phosphate
  modified_base 7: mod_base = OTHER; note = 2'-O-methyluridine-3'-phosphate
  modified_base 8: mod_base = OTHER; note = 2'-deoxy-2'-fluoroadenosine-3'-phosphate
  modified_base 9: mod_base = OTHER; note = 2'-deoxy-2'-fluorouridine-3'-phosphate
  modified_base 10: mod_base = OTHER; note = 2'-O-methyluridine-3'-phosphate
  modified_base 11: mod_base = OTHER; note = 2'-O-methylguanosine-3'-phosphate
  modified_base 12: mod_base = OTHER; note = 2'-O-methyladenosine-3'-phosphate
  modified_base 13: mod_base = OTHER; note = 2'-O-methylguanosine-3'-phosphate
  modified_base 14: mod_base = OTHER; note = 2'-deoxy-2'-fluorouridine-3'-phosphate
  modified_base 15: mod_base = OTHER; note = 2'-O-methyluridine-3'-phosphate
  modified_base 16: mod_base = OTHER; note = 2'-deoxy-2'-fluorouridine-3'-phosphate
  modified_base 17: mod_base = OTHER; note = 2'-O-methylcytidine-3'-phosphate
  modified_base 18: mod_base = OTHER; note = 2'-O-methyluridine-3'-phosphate
  modified_base 19: mod_base = OTHER; note = 2'-O-methylguanosine-3'-phosphate
  modified_base 20: mod_base = OTHER; note = 2'-O-methyluridine-3'-phosphate
  modified_base 21: mod_base = OTHER; note = 2'-O-methylguanosine-3'-phosphorothioate
  modified_base 22: mod_base = OTHER; note = 2'-O-methylcytidine-3'-phosphorothioate
  modified_base 23: mod_base = OTHER; note = 2'-O-methylcytidine
tcactttattgagtttctgtgcc

SEQ ID NO: 33 - RNA, 21 nt, synthetic construct
  source 1..21: mol_type = other RNA
  modified_base 1: mod_base = OTHER; note = 2'-O-methylcytidine-3'-phosphorothioate
  modified_base 2: mod_base = OTHER; note = 2'-O-methyladenosine-3'-phosphorothioate
  modified_base 3: mod_base = OTHER; note = 2'-O-methylcytidine-3'-phosphate
  modified_base 4: mod_base = OTHER; note = 2'-O-methyladenosine-3'-phosphate
  modified_base 5: mod_base = OTHER; note = 2'-O-methylguanosine-3'-phosphate
  modified_base 6: mod_base = OTHER; note = 2'-O-methyladenosine-3'-phosphate
  modified_base 7: mod_base = OTHER; note = 2'-deoxy-2'-fluoroadenosine-3'-phosphate
  modified_base 8: mod_base = OTHER; note = 2'-O-methyladenosine-3'-phosphate
  modified_base 9: mod_base = OTHER; note = 2'-deoxy-2'-fluorocytidine-3'-phosphate
  modified_base 10: mod_base = OTHER; note = 2'-deoxy-2'-fluorouridine-3'-phosphate
  modified_base 11: mod_base = OTHER; note = 2'-deoxy-2'-fluorocytidine-3'-phosphate
  modified_base 12: mod_base = OTHER; note = 2'-O-methyladenosine-3'-phosphate
  modified_base 13: mod_base = OTHER; note = 2'-O-methyladenosine-3'-phosphate
  modified_base 14: mod_base = OTHER; note = 2'-O-methyluridine-3'-phosphate
  modified_base 15: mod_base = OTHER; note = 2'-O-methyladenosine-3'-phosphate
  modified_base 16: mod_base = OTHER; note = 2'-O-methyladenosine-3'-phosphate
  modified_base 17: mod_base = OTHER; note = 2'-O-methyladenosine-3'-phosphate
  modified_base 18: mod_base = OTHER; note = 2'-O-methylguanosine-3'-phosphate
  modified_base 19: mod_base = OTHER; note = 2'-O-methyluridine-3'-phosphate
  modified_base 20: mod_base = OTHER; note = 2'-O-methylguanosine-3'-phosphate
  modified_base 21: mod_base = OTHER; note = 2'-O-methyladenosine-3'-phosphate ((2S,4R)-1-[29-[[2-(acetylamino)-2-deoxy-beta-D-galactopyra nosyl]oxy]-14,14-bis[[3-[[3-[[5-[[2-(acetylamino)-2-deoxy-b eta-D-galactopyranosyl]oxy]-1-oxopentyl]amino]propyl]amino] -3-oxopropoxy]methyl]-1,12,19,25-tetraoxo-16-oxa-13,20,24-t riazanonacos-1-yl]-4-hydroxy-2-pyrrolidinyl)methyl ester
cacagaaactcaataaagtga

SEQ ID NO: 34 - RNA, 23 nt, synthetic construct
  source 1..23: mol_type = other RNA
  modified_base 1: mod_base = OTHER; note = 2'-O-methyluridine-3'-phosphorothioate 5'-(trans-2-methoxycyclohex-1-yl thiophosphate)
  modified_base 2: mod_base = OTHER; note = 2'-deoxy-2'-fluorocytidine-3'-phosphorothioate
  modified_base 3: mod_base = OTHER; note = 2'-O-methyladenosine-3'-phosphate
  modified_base 4: mod_base = OTHER; note = 2'-O-methylcytidine-3'-phosphate
  modified_base 5: mod_base = OTHER; note = 2'-O-methyluridine-3'-phosphate
  modified_base 6: mod_base = OTHER; note = 2'-deoxy-2'-fluorouridine-3'-phosphate
  modified_base 7: mod_base = OTHER; note = 2'-O-methyluridine-3'-phosphate
  modified_base 8: mod_base = OTHER; note = 2'-deoxy-2'-fluoroadenosine-3'-phosphate
  modified_base 9: mod_base = OTHER; note = 2'-deoxy-2'-fluorouridine-3'-phosphate
  modified_base 10: mod_base = OTHER; note = 2'-O-methyluridine-3'-phosphate
  modified_base 11: mod_base = OTHER; note = 2'-O-methylguanosine-3'-phosphate
  modified_base 12: mod_base = OTHER; note = 2'-O-methyladenosine-3'-phosphate
  modified_base 13: mod_base = OTHER; note = 2'-O-methylguanosine-3'-phosphate
  modified_base 14: mod_base = OTHER; note = 2'-deoxy-2'-fluorouridine-3'-phosphate
  modified_base 15: mod_base = OTHER; note = 2'-O-methyluridine-3'-phosphate
  modified_base 16: mod_base = OTHER; note = 2'-deoxy-2'-fluorouridine-3'-phosphate
  modified_base 17: mod_base = OTHER; note = 2'-O-methylcytidine-3'-phosphate
  modified_base 18: mod_base = OTHER; note = 2'-O-methyluridine-3'-phosphate
  modified_base 19: mod_base = OTHER; note = 2'-O-methylguanosine-3'-phosphate
  modified_base 20: mod_base = OTHER; note = 2'-O-methyluridine-3'-phosphate
  modified_base 21: mod_base = OTHER; note = 2'-O-methylguanosine-3'-phosphorothioate
  modified_base 22: mod_base = OTHER; note = 2'-O-methylcytidine-3'-phosphorothioate
  modified_base 23: mod_base = OTHER; note = 2'-O-methylcytidine
tcactttattgagtttctgtgcc

SEQ ID NO: 35 - RNA, 21 nt, synthetic construct
  source 1..21: mol_type = other RNA
  modified_base 1: mod_base = OTHER; note = 2'-O-methylcytidine-3'-phosphorothioate
  modified_base 2: mod_base = OTHER; note = 2'-O-methyladenosine-3'-phosphorothioate
  modified_base 3: mod_base = OTHER; note = 2'-O-methylcytidine-3'-phosphate
  modified_base 4: mod_base = OTHER; note = 2'-O-methyladenosine-3'-phosphate
  modified_base 5: mod_base = OTHER; note = 2'-O-methylguanosine-3'-phosphate
  modified_base 6: mod_base = OTHER; note = 2'-O-methyladenosine-3'-phosphate
  modified_base 7: mod_base = OTHER; note = 2'-deoxy-2'-fluoroadenosine-3'-phosphate
  modified_base 8: mod_base = OTHER; note = 2'-O-methyladenosine-3'-phosphate
  modified_base 9: mod_base = OTHER; note = 2'-deoxy-2'-fluorocytidine-3'-phosphate
  modified_base 10: mod_base = OTHER; note = 2'-deoxy-2'-fluorouridine-3'-phosphate
  modified_base 11: mod_base = OTHER; note = 2'-deoxy-2'-fluorocytidine-3'-phosphate
  modified_base 12: mod_base = OTHER; note = 2'-O-methyladenosine-3'-phosphate
  modified_base 13: mod_base = OTHER; note = 2'-O-methyladenosine-3'-phosphate
  modified_base 14: mod_base = OTHER; note = 2'-O-methyluridine-3'-phosphate
  modified_base 15: mod_base = OTHER; note = 2'-O-methyladenosine-3'-phosphate
  modified_base 16: mod_base = OTHER; note = 2'-O-methyladenosine-3'-phosphate
  modified_base 17: mod_base = OTHER; note = 2'-O-methyladenosine-3'-phosphate
  modified_base 18: mod_base = OTHER; note = 2'-O-methylguanosine-3'-phosphate
  modified_base 19: mod_base = OTHER; note = 2'-O-methyluridine-3'-phosphate
  modified_base 20: mod_base = OTHER; note = 2'-O-methylguanosine-3'-phosphate
  modified_base 21: mod_base = OTHER; note = 2'-O-methyladenosine-3'-phosphate ((2S,4R)-1-[29-[[2-(acetylamino)-2-deoxy-beta-D-galactopyra nosyl]oxy]-14,14-bis[[3-[[3-[[5-[[2-(acetylamino)-2-deoxy-b eta-D-galactopyranosyl]oxy]-1-oxopentyl]amino]propyl]amino] -3-oxopropoxy]methyl]-1,12,19,25-tetraoxo-16-oxa-13,20,24-t riazanonacos-1-yl]-4-hydroxy-2-pyrrolidinyl)methyl ester
cacagaaactcaataaagtga

SEQ ID NO: 36 - RNA, 23 nt, synthetic construct
  source 1..23: mol_type = other RNA
  modified_base 1: mod_base = OTHER; note = 2'-O-methyluridine-3'-phosphorothioate 5'-(trans-5-hydroxy-1,2-dithian-4-yl phosphate)
  modified_base 2: mod_base = OTHER; note = 2'-deoxy-2'-fluorocytidine-3'-phosphorothioate
  modified_base 3: mod_base = OTHER; note = 2'-O-methyladenosine-3'-phosphate
  modified_base 4: mod_base = OTHER; note = 2'-O-methylcytidine-3'-phosphate
  modified_base 5: mod_base = OTHER; note = 2'-O-methyluridine-3'-phosphate
  modified_base 6: mod_base = OTHER; note = 2'-deoxy-2'-fluorouridine-3'-phosphate
  modified_base 7: mod_base = OTHER; note = 2'-O-methyluridine-3'-phosphate
  modified_base 8: mod_base = OTHER; note = 2'-deoxy-2'-fluoroadenosine-3'-phosphate
  modified_base 9: mod_base = OTHER; note = 2'-deoxy-2'-fluorouridine-3'-phosphate
  modified_base 10: mod_base = OTHER; note = 2'-O-methyluridine-3'-phosphate
  modified_base 11: mod_base = OTHER; note = 2'-O-methylguanosine-3'-phosphate
  modified_base 12: mod_base = OTHER; note = 2'-O-methyladenosine-3'-phosphate
  modified_base 13: mod_base = OTHER; note = 2'-O-methylguanosine-3'-phosphate
  modified_base 14: mod_base = OTHER; note = 2'-deoxy-2'-fluorouridine-3'-phosphate
  modified_base 15: mod_base = OTHER; note = 2'-O-methyluridine-3'-phosphate
  modified_base 16: mod_base = OTHER; note = 2'-deoxy-2'-fluorouridine-3'-phosphate
  modified_base 17: mod_base = OTHER; note = 2'-O-methylcytidine-3'-phosphate
  modified_base 18: mod_base = OTHER; note = 2'-O-methyluridine-3'-phosphate
  modified_base 19: mod_base = OTHER; note = 2'-O-methylguanosine-3'-phosphate
  modified_base 20: mod_base = OTHER; note = 2'-O-methyluridine-3'-phosphate
  modified_base 21: mod_base = OTHER; note = 2'-O-methylguanosine-3'-phosphorothioate
  modified_base 22: mod_base = OTHER; note = 2'-O-methylcytidine-3'-phosphorothioate
  modified_base 23: mod_base = OTHER; note = 2'-O-methylcytidine
tcactttattgagtttctgtgcc

SEQ ID NO: 37 - RNA, 21 nt, synthetic construct
  source 1..21: mol_type = other RNA
  modified_base 1: mod_base = OTHER; note = 2'-O-methylcytidine-3'-phosphorothioate
  modified_base 2: mod_base = OTHER; note = 2'-O-methyladenosine-3'-phosphorothioate
  modified_base 3: mod_base = OTHER; note = 2'-O-methylcytidine-3'-phosphate
  modified_base 4: mod_base = OTHER; note = 2'-O-methyladenosine-3'-phosphate
  modified_base 5: mod_base = OTHER; note = 2'-O-methylguanosine-3'-phosphate
  modified_base 6: mod_base = OTHER; note = 2'-O-methyladenosine-3'-phosphate
  modified_base 7: mod_base = OTHER; note = 2'-deoxy-2'-fluoroadenosine-3'-phosphate
  modified_base 8: mod_base = OTHER; note = 2'-O-methyladenosine-3'-phosphate
  modified_base 9: mod_base = OTHER; note = 2'-deoxy-2'-fluorocytidine-3'-phosphate
  modified_base 10: mod_base = OTHER; note = 2'-deoxy-2'-fluorouridine-3'-phosphate
  modified_base 11: mod_base = OTHER; note = 2'-deoxy-2'-fluorocytidine-3'-phosphate
  modified_base 12: mod_base = OTHER; note = 2'-O-methyladenosine-3'-phosphate
  modified_base 13: mod_base = OTHER; note = 2'-O-methyladenosine-3'-phosphate
  modified_base 14: mod_base = OTHER; note = 2'-O-methyluridine-3'-phosphate
  modified_base 15: mod_base = OTHER; note = 2'-O-methyladenosine-3'-phosphate
  modified_base 16: mod_base = OTHER; note = 2'-O-methyladenosine-3'-phosphate
  modified_base 17: mod_base = OTHER; note = 2'-O-methyladenosine-3'-phosphate
  modified_base 18: mod_base = OTHER; note = 2'-O-methylguanosine-3'-phosphate
  modified_base 19: mod_base = OTHER; note = 2'-O-methyluridine-3'-phosphate
  modified_base 20: mod_base = OTHER; note = 2'-O-methylguanosine-3'-phosphate
  modified_base 21: mod_base = OTHER; note = 2'-O-methyladenosine-3'-phosphate ((2S,4R)-1-[29-[[2-(acetylamino)-2-deoxy-beta-D-galactopyra nosyl]oxy]-14,14-bis[[3-[[3-[[5-[[2-(acetylamino)-2-deoxy-b eta-D-galactopyranosyl]oxy]-1-oxopentyl]amino]propyl]amino] -3-oxopropoxy]methyl]-1,12,19,25-tetraoxo-16-oxa-13,20,24-t riazanonacos-1-yl]-4-hydroxy-2-pyrrolidinyl)methyl ester
cacagaaactcaataaagtga

SEQ ID NO: 38 - RNA, 23 nt, synthetic construct
  source 1..23: mol_type = other RNA
  modified_base 1: mod_base = OTHER; note = 2'-O-methyluridine-3'-phosphorothioate 5'-(trans-5-hydroxy-1,2-dithian-4-yl thiophosphate)
  modified_base 2: mod_base = OTHER; note = 2'-deoxy-2'-fluorocytidine-3'-phosphorothioate
  modified_base 3: mod_base = OTHER; note = 2'-O-methyladenosine-3'-phosphate
  modified_base 4: mod_base = OTHER; note = 2'-O-methylcytidine-3'-phosphate
  modified_base 5: mod_base = OTHER; note = 2'-O-methyluridine-3'-phosphate
  modified_base 6: mod_base = OTHER; note = 2'-deoxy-2'-fluorouridine-3'-phosphate
  modified_base 7: mod_base = OTHER; note = 2'-O-methyluridine-3'-phosphate
  modified_base 8: mod_base = OTHER; note = 2'-deoxy-2'-fluoroadenosine-3'-phosphate
  modified_base 9: mod_base = OTHER; note = 2'-deoxy-2'-fluorouridine-3'-phosphate
  modified_base 10: mod_base = OTHER; note = 2'-O-methyluridine-3'-phosphate
  modified_base 11: mod_base = OTHER; note = 2'-O-methylguanosine-3'-phosphate
  modified_base 12: mod_base = OTHER; note = 2'-O-methyladenosine-3'-phosphate
  modified_base 13: mod_base = OTHER; note = 2'-O-methylguanosine-3'-phosphate
  modified_base 14: mod_base = OTHER; note = 2'-deoxy-2'-fluorouridine-3'-phosphate
  modified_base 15: mod_base = OTHER; note = 2'-O-methyluridine-3'-phosphate
  modified_base 16: mod_base = OTHER; note = 2'-deoxy-2'-fluorouridine-3'-phosphate
  modified_base 17: mod_base = OTHER; note = 2'-O-methylcytidine-3'-phosphate
  modified_base 18: mod_base = OTHER; note = 2'-O-methyluridine-3'-phosphate
  modified_base 19: mod_base = OTHER; note = 2'-O-methylguanosine-3'-phosphate
  modified_base 20: mod_base = OTHER; note = 2'-O-methyluridine-3'-phosphate
  modified_base 21: mod_base = OTHER; note = 2'-O-methylguanosine-3'-phosphorothioate
  modified_base 22: mod_base = OTHER; note = 2'-O-methylcytidine-3'-phosphorothioate
  modified_base 23: mod_base = OTHER; note = 2'-O-methylcytidine
tcactttattgagtttctgtgcc

SEQ ID NO: 39 - RNA, 21 nt, synthetic construct
  source 1..21: mol_type = other RNA
  modified_base 1: mod_base = OTHER; note = 2'-O-methylcytidine-3'-phosphorothioate
  modified_base 2: mod_base = OTHER; note = 2'-O-methyladenosine-3'-phosphorothioate
  modified_base 3: mod_base = OTHER; note = 2'-O-methylcytidine-3'-phosphate
  modified_base 4: mod_base = OTHER; note = 2'-O-methyladenosine-3'-phosphate
  modified_base 5: mod_base = OTHER; note = 2'-O-methylguanosine-3'-phosphate
  modified_base 6: mod_base = OTHER; note = 2'-O-methyladenosine-3'-phosphate
  modified_base 7: mod_base = OTHER; note = 2'-deoxy-2'-fluoroadenosine-3'-phosphate
  modified_base 8: mod_base = OTHER; note = 2'-O-methyladenosine-3'-phosphate
  modified_base 9: mod_base = OTHER; note = 2'-deoxy-2'-fluorocytidine-3'-phosphate
  modified_base 10: mod_base = OTHER; note = 2'-deoxy-2'-fluorouridine-3'-phosphate
  modified_base 11: mod_base = OTHER; note = 2'-deoxy-2'-fluorocytidine-3'-phosphate
  modified_base 12: mod_base = OTHER; note = 2'-O-methyladenosine-3'-phosphate
  modified_base 13: mod_base = OTHER; note = 2'-O-methyladenosine-3'-phosphate
  modified_base 14: mod_base = OTHER; note = 2'-O-methyluridine-3'-phosphate
  modified_base 15: mod_base = OTHER; note = 2'-O-methyladenosine-3'-phosphate
  modified_base 16: mod_base = OTHER; note = 2'-O-methyladenosine-3'-phosphate
  modified_base 17: mod_base = OTHER; note = 2'-O-methyladenosine-3'-phosphate
  modified_base 18: mod_base = OTHER; note = 2'-O-methylguanosine-3'-phosphate
  modified_base 19: mod_base = OTHER; note = 2'-O-methyluridine-3'-phosphate
  modified_base 20: mod_base = OTHER; note = 2'-O-methylguanosine-3'-phosphate
  modified_base 21: mod_base = OTHER; note = 2'-O-methyladenosine-3'-phosphate ((2S,4R)-1-[29-[[2-(acetylamino)-2-deoxy-beta-D-galactopyra nosyl]oxy]-14,14-bis[[3-[[3-[[5-[[2-(acetylamino)-2-deoxy-b eta-D-galactopyranosyl]oxy]-1-oxopentyl]amino]propyl]amino] -3-oxopropoxy]methyl]-1,12,19,25-tetraoxo-16-oxa-13,20,24-t riazanonacos-1-yl]-4-hydroxy-2-pyrrolidinyl)methyl ester
cacagaaactcaataaagtga

SEQ ID NO: 40 - RNA, 23 nt, synthetic construct
  source 1..23: mol_type = other RNA
  modified_base 1: mod_base = OTHER; note = 2'-O-methyluridine-3'-phosphorothioate 5'-(cis-3,3,5-trimethyl-1,2-dithiolan-4-yl phosphate)
  modified_base 2: mod_base = OTHER; note = 2'-deoxy-2'-fluorocytidine-3'-phosphorothioate
  modified_base 3: mod_base = OTHER; note = 2'-O-methyladenosine-3'-phosphate
  modified_base 4: mod_base = OTHER; note = 2'-O-methylcytidine-3'-phosphate
  modified_base 5: mod_base = OTHER; note = 2'-O-methyluridine-3'-phosphate
  modified_base 6: mod_base = OTHER; note = 2'-deoxy-2'-fluorouridine-3'-phosphate
  modified_base 7: mod_base = OTHER; note = 2'-O-methyluridine-3'-phosphate
  modified_base 8: mod_base = OTHER; note = 2'-deoxy-2'-fluoroadenosine-3'-phosphate
  modified_base 9: mod_base = OTHER; note = 2'-deoxy-2'-fluorouridine-3'-phosphate
  modified_base 10: mod_base = OTHER; note = 2'-O-methyluridine-3'-phosphate
  modified_base 11: mod_base = OTHER; note = 2'-O-methylguanosine-3'-phosphate
  modified_base 12: mod_base = OTHER; note = 2'-O-methyladenosine-3'-phosphate
  modified_base 13: mod_base = OTHER; note = 2'-O-methylguanosine-3'-phosphate
  modified_base 14: mod_base = OTHER; note = 2'-deoxy-2'-fluorouridine-3'-phosphate
  modified_base 15: mod_base = OTHER; note = 2'-O-methyluridine-3'-phosphate
  modified_base 16: mod_base = OTHER; note = 2'-deoxy-2'-fluorouridine-3'-phosphate
  modified_base 17: mod_base = OTHER; note = 2'-O-methylcytidine-3'-phosphate
  modified_base 18: mod_base = OTHER; note = 2'-O-methyluridine-3'-phosphate
  modified_base 19: mod_base = OTHER; note = 2'-O-methylguanosine-3'-phosphate
  modified_base 20: mod_base = OTHER; note = 2'-O-methyluridine-3'-phosphate
  modified_base 21: mod_base = OTHER; note = 2'-O-methylguanosine-3'-phosphorothioate
  modified_base 22: mod_base = OTHER; note = 2'-O-methylcytidine-3'-phosphorothioate
  modified_base 23: mod_base = OTHER; note = 2'-O-methylcytidine
tcactttattgagtttctgtgcc

SEQ ID NO: 41 - RNA, 21 nt, synthetic construct
  source 1..21: mol_type = other RNA
  modified_base 1: mod_base = OTHER; note = 2'-O-methylcytidine-3'-phosphorothioate
  modified_base 2: mod_base = OTHER; note = 2'-O-methyladenosine-3'-phosphorothioate
  modified_base 3: mod_base = OTHER; note = 2'-O-methylcytidine-3'-phosphate
  modified_base 4: mod_base = OTHER; note = 2'-O-methyladenosine-3'-phosphate
  modified_base 5: mod_base = OTHER; note = 2'-O-methylguanosine-3'-phosphate
  modified_base 6: mod_base = OTHER; note = 2'-O-methyladenosine-3'-phosphate
  modified_base 7: mod_base = OTHER; note = 2'-deoxy-2'-fluoroadenosine-3'-phosphate
  modified_base 8: mod_base = OTHER; note = 2'-O-methyladenosine-3'-phosphate
  modified_base 9: mod_base = OTHER; note = 2'-deoxy-2'-fluorocytidine-3'-phosphate
  modified_base 10: mod_base = OTHER; note = 2'-deoxy-2'-fluorouridine-3'-phosphate
  modified_base 11: mod_base = OTHER; note = 2'-deoxy-2'-fluorocytidine-3'-phosphate
  modified_base 12: mod_base = OTHER; note = 2'-O-methyladenosine-3'-phosphate
  modified_base 13: mod_base = OTHER; note = 2'-O-methyladenosine-3'-phosphate
  modified_base 14: mod_base = OTHER; note = 2'-O-methyluridine-3'-phosphate
  modified_base 15: mod_base = OTHER; note = 2'-O-methyladenosine-3'-phosphate
  modified_base 16: mod_base = OTHER; note = 2'-O-methyladenosine-3'-phosphate
  modified_base 17: mod_base = OTHER; note = 2'-O-methyladenosine-3'-phosphate
  modified_base 18: mod_base = OTHER; note = 2'-O-methylguanosine-3'-phosphate
  modified_base 19: mod_base = OTHER; note = 2'-O-methyluridine-3'-phosphate
  modified_base 20: mod_base = OTHER; note = 2'-O-methylguanosine-3'-phosphate
  modified_base 21: mod_base = OTHER; note = 2'-O-methyladenosine-3'-phosphate ((2S,4R)-1-[29-[[2-(acetylamino)-2-deoxy-beta-D-galactopyra nosyl]oxy]-14,14-bis[[3-[[3-[[5-[[2-(acetylamino)-2-deoxy-b eta-D-galactopyranosyl]oxy]-1-oxopentyl]amino]propyl]amino] -3-oxopropoxy]methyl]-1,12,19,25-tetraoxo-16-oxa-13,20,24-t riazanonacos-1-yl]-4-hydroxy-2-pyrrolidinyl)methyl ester
cacagaaactcaataaagtga

SEQ ID NO: 42 - RNA, 23 nt, synthetic construct
  source 1..23: mol_type = other RNA
  modified_base 1: mod_base = OTHER; note = 2'-O-methyluridine-3'-phosphorothioate 5'-(cis-3,3,5-trimethyl-1,2-dithiolan-4-yl thiophosphate)
  modified_base 2: mod_base = OTHER; note = 2'-deoxy-2'-fluorocytidine-3'-phosphorothioate
  modified_base 3: mod_base = OTHER; note = 2'-O-methyladenosine-3'-phosphate
  modified_base 4: mod_base = OTHER; note = 2'-O-methylcytidine-3'-phosphate
  modified_base 5: mod_base = OTHER; note = 2'-O-methyluridine-3'-phosphate
  modified_base 6: mod_base = OTHER; note = 2'-deoxy-2'-fluorouridine-3'-phosphate
  modified_base 7: mod_base = OTHER; note = 2'-O-methyluridine-3'-phosphate
  modified_base 8: mod_base = OTHER; note = 2'-deoxy-2'-fluoroadenosine-3'-phosphate
  modified_base 9: mod_base = OTHER; note = 2'-deoxy-2'-fluorouridine-3'-phosphate
  modified_base 10: mod_base = OTHER; note = 2'-O-methyluridine-3'-phosphate
  modified_base 11: mod_base = OTHER; note = 2'-O-methylguanosine-3'-phosphate
  modified_base 12: mod_base = OTHER; note = 2'-O-methyladenosine-3'-phosphate
  modified_base 13: mod_base = OTHER; note = 2'-O-methylguanosine-3'-phosphate
  modified_base 14: mod_base = OTHER; note = 2'-deoxy-2'-fluorouridine-3'-phosphate
  modified_base 15: mod_base = OTHER; note = 2'-O-methyluridine-3'-phosphate
  modified_base 16: mod_base = OTHER; note = 2'-deoxy-2'-fluorouridine-3'-phosphate
  modified_base 17: mod_base = OTHER; note = 2'-O-methylcytidine-3'-phosphate
  modified_base 18: mod_base = OTHER; note = 2'-O-methyluridine-3'-phosphate
  modified_base 19: mod_base = OTHER; note = 2'-O-methylguanosine-3'-phosphate
  modified_base 20: mod_base = OTHER; note = 2'-O-methyluridine-3'-phosphate
  modified_base 21: mod_base = OTHER; note = 2'-O-methylguanosine-3'-phosphorothioate
  modified_base 22: mod_base = OTHER; note = 2'-O-methylcytidine-3'-phosphorothioate
  modified_base 23: mod_base = OTHER; note = 2'-O-methylcytidine
tcactttattgagtttctgtgcc

SEQ ID NO: 43 - RNA, 21 nt, synthetic construct
  source 1..21: mol_type = other RNA
  modified_base 1: mod_base = OTHER; note = 2'-O-methylcytidine-3'-phosphorothioate
  modified_base 2: mod_base = OTHER; note = 2'-O-methyladenosine-3'-phosphorothioate
  modified_base 3: mod_base = OTHER; note = 2'-O-methylcytidine-3'-phosphate
  modified_base 4: mod_base = OTHER; note = 2'-O-methyladenosine-3'-phosphate
  modified_base 5: mod_base = OTHER; note = 2'-O-methylguanosine-3'-phosphate
  modified_base 6: mod_base = OTHER; note = 2'-O-methyladenosine-3'-phosphate
  modified_base 7: mod_base = OTHER; note = 2'-deoxy-2'-fluoroadenosine-3'-phosphate
  modified_base 8: mod_base = OTHER; note = 2'-O-methyladenosine-3'-phosphate
  modified_base 9: mod_base = OTHER; note = 2'-deoxy-2'-fluorocytidine-3'-phosphate
  modified_base 10: mod_base = OTHER; note = 2'-deoxy-2'-fluorouridine-3'-phosphate
  modified_base 11: mod_base = OTHER; note = 2'-deoxy-2'-fluorocytidine-3'-phosphate
  modified_base 12: mod_base = OTHER; note = 2'-O-methyladenosine-3'-phosphate
  modified_base 13: mod_base = OTHER; note = 2'-O-methyladenosine-3'-phosphate
  modified_base 14: mod_base = OTHER; note = 2'-O-methyluridine-3'-phosphate
  modified_base 15: mod_base = OTHER; note = 2'-O-methyladenosine-3'-phosphate
  modified_base 16: mod_base = OTHER; note = 2'-O-methyladenosine-3'-phosphate
  modified_base 17: mod_base = OTHER; note = 2'-O-methyladenosine-3'-phosphate
  modified_base 18: mod_base = OTHER; note = 2'-O-methylguanosine-3'-phosphate
  modified_base 19: mod_base = OTHER; note = 2'-O-methyluridine-3'-phosphate
  modified_base 20: mod_base = OTHER; note = 2'-O-methylguanosine-3'-phosphate
  modified_base 21: mod_base = OTHER; note = 2'-O-methyladenosine-3'-phosphate ((2S,4R)-1-[29-[[2-(acetylamino)-2-deoxy-beta-D-galactopyra nosyl]oxy]-14,14-bis[[3-[[3-[[5-[[2-(acetylamino)-2-deoxy-b eta-D-galactopyranosyl]oxy]-1-oxopentyl]amino]propyl]amino] -3-oxopropoxy]methyl]-1,12,19,25-tetraoxo-16-oxa-13,20,24-t riazanonacos-1-yl]-4-hydroxy-2-pyrrolidinyl)methyl ester
cacagaaactcaataaagtga

SEQ ID NO: 44 - RNA, 23 nt, synthetic construct
  source 1..23: mol_type = other RNA
  modified_base 1: mod_base = OTHER; note = 2'-O-methyluridine-3'-phosphorothioate 5'-(3,3,5,5-tetramethyl-1,2-dithiolan-4-yl phosphate)
  modified_base 2: mod_base = OTHER; note = 2'-deoxy-2'-fluorocytidine-3'-phosphorothioate
  modified_base 3: mod_base = OTHER; note = 2'-O-methyladenosine-3'-phosphate
  modified_base 4: mod_base = OTHER; note = 2'-O-methylcytidine-3'-phosphate
  modified_base 5: mod_base = OTHER; note = 2'-O-methyluridine-3'-phosphate
  modified_base 6: mod_base = OTHER; note = 2'-deoxy-2'-fluorouridine-3'-phosphate
  modified_base 7: mod_base = OTHER; note = 2'-O-methyluridine-3'-phosphate
  modified_base 8: mod_base = OTHER; note = 2'-deoxy-2'-fluoroadenosine-3'-phosphate
  modified_base 9: mod_base = OTHER; note = 2'-deoxy-2'-fluorouridine-3'-phosphate
  modified_base 10: mod_base = OTHER; note = 2'-O-methyluridine-3'-phosphate
  modified_base 11: mod_base = OTHER; note = 2'-O-methylguanosine-3'-phosphate
  modified_base 12: mod_base = OTHER; note = 2'-O-methyladenosine-3'-phosphate
  modified_base 13: mod_base = OTHER; note = 2'-O-methylguanosine-3'-phosphate
  modified_base 14: mod_base = OTHER; note = 2'-deoxy-2'-fluorouridine-3'-phosphate
  modified_base 15: mod_base = OTHER; note = 2'-O-methyluridine-3'-phosphate
  modified_base 16: mod_base = OTHER; note = 2'-deoxy-2'-fluorouridine-3'-phosphate
  modified_base 17: mod_base = OTHER; note = 2'-O-methylcytidine-3'-phosphate
  modified_base 18: mod_base = OTHER; note = 2'-O-methyluridine-3'-phosphate
  modified_base 19: mod_base = OTHER; note = 2'-O-methylguanosine-3'-phosphate
  modified_base 20: mod_base = OTHER; note = 2'-O-methyluridine-3'-phosphate
  modified_base 21: mod_base = OTHER; note = 2'-O-methylguanosine-3'-phosphorothioate
  modified_base 22: mod_base = OTHER; note = 2'-O-methylcytidine-3'-phosphorothioate
  modified_base 23: mod_base = OTHER; note = 2'-O-methylcytidine
tcactttattgagtttctgtgcc

SEQ ID NO: 45 - RNA, 21 nt, synthetic construct
  source 1..21: mol_type = other RNA
  modified_base 1: mod_base = OTHER; note = 2'-O-methylcytidine-3'-phosphorothioate
  modified_base 2: mod_base = OTHER; note = 2'-O-methyladenosine-3'-phosphorothioate
  modified_base 3: mod_base = OTHER; note = 2'-O-methylcytidine-3'-phosphate
  modified_base 4: mod_base = OTHER; note = 2'-O-methyladenosine-3'-phosphate
  modified_base 5: mod_base = OTHER; note = 2'-O-methylguanosine-3'-phosphate
  modified_base 6: mod_base = OTHER; note = 2'-O-methyladenosine-3'-phosphate
  modified_base 7: mod_base = OTHER; note = 2'-deoxy-2'-fluoroadenosine-3'-phosphate
  modified_base 8: mod_base = OTHER; note = 2'-O-methyladenosine-3'-phosphate
  modified_base 9: mod_base = OTHER; note = 2'-deoxy-2'-fluorocytidine-3'-phosphate
  modified_base 10: mod_base = OTHER; note = 2'-deoxy-2'-fluorouridine-3'-phosphate
  modified_base 11: mod_base = OTHER; note = 2'-deoxy-2'-fluorocytidine-3'-phosphate
  modified_base 12: mod_base = OTHER; note = 2'-O-methyladenosine-3'-phosphate
  modified_base 13: mod_base = OTHER; note = 2'-O-methyladenosine-3'-phosphate
  modified_base 14: mod_base = OTHER; note = 2'-O-methyluridine-3'-phosphate
  modified_base 15: mod_base = OTHER; note = 2'-O-methyladenosine-3'-phosphate
  modified_base 16: mod_base = OTHER; note = 2'-O-methyladenosine-3'-phosphate
  modified_base 17: mod_base = OTHER; note = 2'-O-methyladenosine-3'-phosphate
  modified_base 18: mod_base = OTHER; note = 2'-O-methylguanosine-3'-phosphate
  modified_base 19: mod_base = OTHER; note = 2'-O-methyluridine-3'-phosphate
  modified_base 20: mod_base = OTHER; note = 2'-O-methylguanosine-3'-phosphate
  modified_base 21: mod_base = OTHER; note = 2'-O-methyladenosine-3'-phosphate ((2S,4R)-1-[29-[[2-(acetylamino)-2-deoxy-beta-D-galactopyra nosyl]oxy]-14,14-bis[[3-[[3-[[5-[[2-(acetylamino)-2-deoxy-b eta-D-galactopyranosyl]oxy]-1-oxopentyl]amino]propyl]amino] -3-oxopropoxy]methyl]-1,12,19,25-tetraoxo-16-oxa-13,20,24-t riazanonacos-1-yl]-4-hydroxy-2-pyrrolidinyl)methyl ester
cacagaaactcaataaagtga

SEQ ID NO: 46 - RNA, 23 nt, synthetic construct
  source 1..23: mol_type = other RNA
  modified_base 1: mod_base = OTHER; note = 2'-O-methyluridine-3'-phosphorothioate 5'-(3,3,5,5-tetramethyl-1,2-dithiolan-4-yl thiophosphate)
  modified_base 2: mod_base = OTHER; note = 2'-deoxy-2'-fluorocytidine-3'-phosphorothioate
  modified_base 3: mod_base = OTHER; note = 2'-O-methyladenosine-3'-phosphate
  modified_base 4: mod_base = OTHER; note = 2'-O-methylcytidine-3'-phosphate
  modified_base 5: mod_base = OTHER; note = 2'-O-methyluridine-3'-phosphate
  modified_base 6: mod_base = OTHER; note = 2'-deoxy-2'-fluorouridine-3'-phosphate
  modified_base 7: mod_base = OTHER; note = 2'-O-methyluridine-3'-phosphate
  modified_base 8: mod_base = OTHER; note = 2'-deoxy-2'-fluoroadenosine-3'-phosphate
  modified_base 9: mod_base = OTHER; note = 2'-deoxy-2'-fluorouridine-3'-phosphate
  modified_base 10: mod_base = OTHER; note = 2'-O-methyluridine-3'-phosphate
  modified_base 11: mod_base = OTHER; note = 2'-O-methylguanosine-3'-phosphate
  modified_base 12: mod_base = OTHER; note = 2'-O-methyladenosine-3'-phosphate
  modified_base 13: mod_base = OTHER; note = 2'-O-methylguanosine-3'-phosphate
  modified_base 14: mod_base = OTHER; note = 2'-deoxy-2'-fluorouridine-3'-phosphate
  modified_base 15: mod_base = OTHER; note = 2'-O-methyluridine-3'-phosphate
  modified_base 16: mod_base = OTHER; note = 2'-deoxy-2'-fluorouridine-3'-phosphate
  modified_base 17: mod_base = OTHER; note = 2'-O-methylcytidine-3'-phosphate
  modified_base 18: mod_base = OTHER; note = 2'-O-methyluridine-3'-phosphate
  modified_base 19: mod_base = OTHER; note = 2'-O-methylguanosine-3'-phosphate
  modified_base 20: mod_base = OTHER; note = 2'-O-methyluridine-3'-phosphate
  modified_base 21: mod_base = OTHER; note = 2'-O-methylguanosine-3'-phosphorothioate
  modified_base 22: mod_base = OTHER; note = 2'-O-methylcytidine-3'-phosphorothioate
  modified_base 23: mod_base = OTHER; note = 2'-O-methylcytidine
tcactttattgagtttctgtgcc

SEQ ID NO: 47 - RNA, 21 nt, synthetic construct
  source 1..21: mol_type = other RNA
  modified_base 1: mod_base = OTHER; note = 2'-O-methylcytidine-3'-phosphorothioate
  modified_base 2: mod_base = OTHER; note = 2'-O-methyladenosine-3'-phosphorothioate
  modified_base 3: mod_base = OTHER; note = 2'-O-methylcytidine-3'-phosphate
  modified_base 4: mod_base = OTHER; note = 2'-O-methyladenosine-3'-phosphate
  modified_base 5: mod_base = OTHER; note = 2'-O-methylguanosine-3'-phosphate
  modified_base 6: mod_base = OTHER; note = 2'-O-methyladenosine-3'-phosphate
  modified_base 7: mod_base = OTHER; note = 2'-deoxy-2'-fluoroadenosine-3'-phosphate
  modified_base 8: mod_base = OTHER; note = 2'-O-methyladenosine-3'-phosphate
  modified_base 9: mod_base = OTHER; note = 2'-deoxy-2'-fluorocytidine-3'-phosphate
  modified_base 10: mod_base = OTHER; note = 2'-deoxy-2'-fluorouridine-3'-phosphate
  modified_base 11: mod_base = OTHER; note = 2'-deoxy-2'-fluorocytidine-3'-phosphate
  modified_base 12: mod_base = OTHER; note = 2'-O-methyladenosine-3'-phosphate
  modified_base 13: mod_base = OTHER; note = 2'-O-methyladenosine-3'-phosphate
  modified_base 14: mod_base = OTHER; note = 2'-O-methyluridine-3'-phosphate
  modified_base 15: mod_base = OTHER; note = 2'-O-methyladenosine-3'-phosphate
  modified_base 16: mod_base = OTHER; note = 2'-O-methyladenosine-3'-phosphate
  modified_base 17: mod_base = OTHER; note = 2'-O-methyladenosine-3'-phosphate
  modified_base 18: mod_base = OTHER; note = 2'-O-methylguanosine-3'-phosphate
  modified_base 19: mod_base = OTHER; note = 2'-O-methyluridine-3'-phosphate
  modified_base 20: mod_base = OTHER; note = 2'-O-methylguanosine-3'-phosphate
  modified_base 21: mod_base = OTHER; note = 2'-O-methyladenosine-3'-phosphate ((2S,4R)-1-[29-[[2-(acetylamino)-2-deoxy-beta-D-galactopyra nosyl]oxy]-14,14-bis[[3-[[3-[[5-[[2-(acetylamino)-2-deoxy-b eta-D-galactopyranosyl]oxy]-1-oxopentyl]amino]propyl]amino] -3-oxopropoxy]methyl]-1,12,19,25-tetraoxo-16-oxa-13,20,24-t riazanonacos-1-yl]-4-hydroxy-2-pyrrolidinyl)methyl ester
cacagaaactcaataaagtga

SEQ ID NO: 48 - RNA, 23 nt, synthetic construct
  source 1..23: mol_type = other RNA
  modified_base 1: mod_base = OTHER; note = 2'-O-methyluridine-3'-phosphate 5'-(trans-2-methoxycyclohex-1-yl thiophosphate)
  modified_base 2: mod_base = OTHER; note = 2'-deoxy-2'-fluorocytidine-3'-phosphate
  modified_base 3: mod_base = OTHER; note = 2'-O-methyladenosine-3'-phosphate
  modified_base 4: mod_base = OTHER; note = 2'-O-methylcytidine-3'-phosphate
  modified_base 5: mod_base = OTHER; note = 2'-O-methyluridine-3'-phosphate
  modified_base 6: mod_base = OTHER; note = 2'-deoxy-2'-fluorouridine-3'-phosphate
  modified_base 7: mod_base = OTHER; note = 2'-O-methyluridine-3'-phosphate
  modified_base 8: mod_base = OTHER; note = 2'-deoxy-2'-fluoroadenosine-3'-phosphate
  modified_base 9: mod_base = OTHER; note = 2'-deoxy-2'-fluorouridine-3'-phosphate
  modified_base 10: mod_base = OTHER; note = 2'-O-methyluridine-3'-phosphate
  modified_base 11: mod_base = OTHER; note = 2'-O-methylguanosine-3'-phosphate
  modified_base 12: mod_base = OTHER; note = 2'-O-methyladenosine-3'-phosphate
  modified_base 13: mod_base = OTHER; note = 2'-O-methylguanosine-3'-phosphate
  modified_base 14: mod_base = OTHER; note = 2'-deoxy-2'-fluorouridine-3'-phosphate
  modified_base 15: mod_base = OTHER; note = 2'-O-methyluridine-3'-phosphate
  modified_base 16: mod_base = OTHER; note = 2'-deoxy-2'-fluorouridine-3'-phosphate
  modified_base 17: mod_base = OTHER; note = 2'-O-methylcytidine-3'-phosphate
  modified_base 18: mod_base = OTHER; note = 2'-O-methyluridine-3'-phosphate
  modified_base 19: mod_base = OTHER; note = 2'-O-methylguanosine-3'-phosphate
  modified_base 20: mod_base = OTHER; note = 2'-O-methyluridine-3'-phosphate
  modified_base 21: mod_base = OTHER; note = 2'-O-methylguanosine-3'-phosphorothioate
  modified_base 22: mod_base = OTHER; note = 2'-O-methylcytidine-3'-phosphorothioate
  modified_base 23: mod_base = OTHER; note = 2'-O-methylcytidine
tcactttattgagtttctgtgcc

SEQ ID NO: 49 - RNA, 21 nt, synthetic construct
  source 1..21: mol_type = other RNA
  modified_base 1: mod_base = OTHER; note = 2'-O-methylcytidine-3'-phosphorothioate
  modified_base 2: mod_base = OTHER; note = 2'-O-methyladenosine-3'-phosphorothioate
  modified_base 3: mod_base = OTHER; note = 2'-O-methylcytidine-3'-phosphate
  modified_base 4: mod_base = OTHER; note = 2'-O-methyladenosine-3'-phosphate
  modified_base 5: mod_base = OTHER; note = 2'-O-methylguanosine-3'-phosphate
  modified_base 6: mod_base = OTHER; note = 2'-O-methyladenosine-3'-phosphate
  modified_base 7: mod_base = OTHER; note = 2'-deoxy-2'-fluoroadenosine-3'-phosphate
  modified_base 8: mod_base = OTHER; note = 2'-O-methyladenosine-3'-phosphate
  modified_base 9: mod_base = OTHER; note = 2'-deoxy-2'-fluorocytidine-3'-phosphate
  modified_base 10: mod_base = OTHER; note = 2'-deoxy-2'-fluorouridine-3'-phosphate
  modified_base 11: mod_base = OTHER; note = 2'-deoxy-2'-fluorocytidine-3'-phosphate
  modified_base 12: mod_base = OTHER; note = 2'-O-methyladenosine-3'-phosphate
  modified_base 13: mod_base = OTHER; note = 2'-O-methyladenosine-3'-phosphate
  modified_base 14: mod_base = OTHER; note = 2'-O-methyluridine-3'-phosphate
  modified_base 15: mod_base = OTHER; note = 2'-O-methyladenosine-3'-phosphate
  modified_base 16: mod_base = OTHER; note = 2'-O-methyladenosine-3'-phosphate
  modified_base 17: mod_base = OTHER; note = 2'-O-methyladenosine-3'-phosphate
  modified_base 18: mod_base = OTHER; note = 2'-O-methylguanosine-3'-phosphate
  modified_base 19: mod_base = OTHER; note = 2'-O-methyluridine-3'-phosphate
  modified_base 20: mod_base = OTHER; note = 2'-O-methylguanosine-3'-phosphate
  modified_base 21: mod_base = OTHER; note = 2'-O-methyladenosine-3'-phosphate ((2S,4R)-1-[29-[[2-(acetylamino)-2-deoxy-beta-D-galactopyra nosyl]oxy]-14,14-bis[[3-[[3-[[5-[[2-(acetylamino)-2-deoxy-b eta-D-galactopyranosyl]oxy]-1-oxopentyl]amino]propyl]amino] -3-oxopropoxy]methyl]-1,12,19,25-tetraoxo-16-oxa-13,20,24-t riazanonacos-1-yl]-4-hydroxy-2-pyrrolidinyl)methyl ester
cacagaaactcaataaagtga

SEQ ID NO: 50 - RNA, 23 nt, synthetic construct
  source 1..23: mol_type = other RNA
  modified_base 1: mod_base = OTHER; note = 2'-O-methyluridine-3'-phosphate 5'-(trans-5-hydroxy-1,2-dithian-4-yl thiophosphate)
  modified_base 2: mod_base = OTHER; note = 2'-deoxy-2'-fluorocytidine-3'-phosphate
  modified_base 3: mod_base = OTHER; note = 2'-O-methyladenosine-3'-phosphate
  modified_base 4: mod_base = OTHER; note = 2'-O-methylcytidine-3'-phosphate
  modified_base 5: mod_base = OTHER; note = 2'-O-methyluridine-3'-phosphate
  modified_base 6: mod_base = OTHER; note = 2'-deoxy-2'-fluorouridine-3'-phosphate
  modified_base 7: mod_base = OTHER; note = 2'-O-methyluridine-3'-phosphate
  modified_base 8: mod_base = OTHER; note = 2'-deoxy-2'-fluoroadenosine-3'-phosphate
  modified_base 9: mod_base = OTHER; note = 2'-deoxy-2'-fluorouridine-3'-phosphate
  modified_base 10: mod_base = OTHER; note = 2'-O-methyluridine-3'-phosphate
  modified_base 11: mod_base = OTHER; note = 2'-O-methylguanosine-3'-phosphate
  modified_base 12: mod_base = OTHER; note = 2'-O-methyladenosine-3'-phosphate
  modified_base 13: mod_base = OTHER; note = 2'-O-methylguanosine-3'-phosphate
  modified_base 14: mod_base = OTHER; note = 2'-deoxy-2'-fluorouridine-3'-phosphate
  modified_base 15: mod_base = OTHER; note = 2'-O-methyluridine-3'-phosphate
  modified_base 16: mod_base = OTHER; note = 2'-deoxy-2'-fluorouridine-3'-phosphate
  modified_base 17: mod_base = OTHER; note = 2'-O-methylcytidine-3'-phosphate
  modified_base 18: mod_base = OTHER; note = 2'-O-methyluridine-3'-phosphate
  modified_base 19: mod_base = OTHER; note = 2'-O-methylguanosine-3'-phosphate
  modified_base 20: mod_base = OTHER; note = 2'-O-methyluridine-3'-phosphate
  modified_base 21: mod_base = OTHER; note = 2'-O-methylguanosine-3'-phosphorothioate
  modified_base 22: mod_base = OTHER; note = 2'-O-methylcytidine-3'-phosphorothioate
  modified_base 23: mod_base = OTHER; note = 2'-O-methylcytidine
tcactttattgagtttctgtgcc

SEQ ID NO: 51 - RNA, 21 nt, synthetic construct
  source 1..21: mol_type = other RNA
  modified_base 1: mod_base = OTHER; note = 2'-O-methylcytidine-3'-phosphorothioate
  modified_base 2: mod_base = OTHER; note = 2'-O-methyladenosine-3'-phosphorothioate
  modified_base 3: mod_base = OTHER; note = 2'-O-methylcytidine-3'-phosphate
  modified_base 4: mod_base = OTHER; note = 2'-O-methyladenosine-3'-phosphate
  modified_base 5: mod_base = OTHER; note = 2'-O-methylguanosine-3'-phosphate
  modified_base 6: mod_base = OTHER; note = 2'-O-methyladenosine-3'-phosphate
  modified_base 7: mod_base = OTHER; note = 2'-deoxy-2'-fluoroadenosine-3'-phosphate
  modified_base 8: mod_base = OTHER; note = 2'-O-methyladenosine-3'-phosphate
  modified_base 9: mod_base = OTHER; note = 2'-deoxy-2'-fluorocytidine-3'-phosphate
  modified_base 10: mod_base = OTHER; note = 2'-deoxy-2'-fluorouridine-3'-phosphate
  modified_base 11: mod_base = OTHER; note = 2'-deoxy-2'-fluorocytidine-3'-phosphate
  modified_base 12: mod_base = OTHER; note = 2'-O-methyladenosine-3'-phosphate
  modified_base 13: mod_base = OTHER; note = 2'-O-methyladenosine-3'-phosphate
  modified_base 14: mod_base = OTHER; note = 2'-O-methyluridine-3'-phosphate
  modified_base 15: mod_base = OTHER; note = 2'-O-methyladenosine-3'-phosphate
  modified_base 16: mod_base = OTHER; note = 2'-O-methyladenosine-3'-phosphate
  modified_base 17: mod_base = OTHER; note = 2'-O-methyladenosine-3'-phosphate
  modified_base 18: mod_base = OTHER; note = 2'-O-methylguanosine-3'-phosphate
  modified_base 19: mod_base = OTHER; note = 2'-O-methyluridine-3'-phosphate
  modified_base 20: mod_base = OTHER; note = 2'-O-methylguanosine-3'-phosphate
  modified_base 21: mod_base = OTHER; note = 2'-O-methyladenosine-3'-phosphate ((2S,4R)-1-[29-[[2-(acetylamino)-2-deoxy-beta-D-galactopyra nosyl]oxy]-14,14-bis[[3-[[3-[[5-[[2-(acetylamino)-2-deoxy-b eta-D-galactopyranosyl]oxy]-1-oxopentyl]amino]propyl]amino] -3-oxopropoxy]methyl]-1,12,19,25-tetraoxo-16-oxa-13,20,24-t riazanonacos-1-yl]-4-hydroxy-2-pyrrolidinyl)methyl ester
cacagaaactcaataaagtga

SEQ ID NO: 52 - RNA, 23 nt, synthetic construct
  source 1..23: mol_type = other RNA
  modified_base 1: mod_base = OTHER; note = 2'-O-methyluridine-3'-phosphate 5'-(cis-3,3,5-trimethyl-1,2-dithiolan-4-yl thiophosphate)
  modified_base 2: mod_base = OTHER; note = 2'-deoxy-2'-fluorocytidine-3'-phosphate
  modified_base 3: mod_base = OTHER; note = 2'-O-methyladenosine-3'-phosphate
  modified_base 4: mod_base = OTHER; note = 2'-O-methylcytidine-3'-phosphate
  modified_base 5: mod_base = OTHER; note = 2'-O-methyluridine-3'-phosphate
  modified_base 6: mod_base = OTHER; note = 2'-deoxy-2'-fluorouridine-3'-phosphate
  modified_base 7: mod_base = OTHER; note = 2'-O-methyluridine-3'-phosphate
  modified_base 8: mod_base = OTHER; note = 2'-deoxy-2'-fluoroadenosine-3'-phosphate
  modified_base 9: mod_base = OTHER; note = 2'-deoxy-2'-fluorouridine-3'-phosphate
  modified_base 10: mod_base = OTHER; note = 2'-O-methyluridine-3'-phosphate
  modified_base 11: mod_base = OTHER; note = 2'-O-methylguanosine-3'-phosphate
  modified_base 12: mod_base = OTHER; note = 2'-O-methyladenosine-3'-phosphate
  modified_base 13: mod_base = OTHER; note = 2'-O-methylguanosine-3'-phosphate
  modified_base 14: mod_base = OTHER; note = 2'-deoxy-2'-fluorouridine-3'-phosphate
  modified_base 15: mod_base = OTHER; note = 2'-O-methyluridine-3'-phosphate
  modified_base 16: mod_base = OTHER; note = 2'-deoxy-2'-fluorouridine-3'-phosphate
  modified_base 17: mod_base = OTHER; note = 2'-O-methylcytidine-3'-phosphate
  modified_base 18: mod_base = OTHER; note = 2'-O-methyluridine-3'-phosphate
  modified_base 19: mod_base = OTHER; note = 2'-O-methylguanosine-3'-phosphate
  modified_base 20: mod_base = OTHER; note = 2'-O-methyluridine-3'-phosphate
  modified_base 21: mod_base = OTHER; note = 2'-O-methylguanosine-3'-phosphorothioate
  modified_base 22: mod_base = OTHER; note = 2'-O-methylcytidine-3'-phosphorothioate
  modified_base 23: mod_base = OTHER; note = 2'-O-methylcytidine
tcactttattgagtttctgtgcc

SEQ ID NO: 53 - RNA, 21 nt, synthetic construct
  source 1..21: mol_type = other RNA
  modified_base 1: mod_base = OTHER; note = 2'-O-methylcytidine-3'-phosphorothioate
  modified_base 2: mod_base = OTHER; note = 2'-O-methyladenosine-3'-phosphorothioate
  modified_base 3: mod_base = OTHER; note = 2'-O-methylcytidine-3'-phosphate
  modified_base 4: mod_base = OTHER; note = 2'-O-methyladenosine-3'-phosphate
  modified_base 5: mod_base = OTHER; note = 2'-O-methylguanosine-3'-phosphate
  modified_base 6: mod_base = OTHER; note = 2'-O-methyladenosine-3'-phosphate
  modified_base 7: mod_base = OTHER; note = 2'-deoxy-2'-fluoroadenosine-3'-phosphate
  modified_base 8: mod_base = OTHER; note = 2'-O-methyladenosine-3'-phosphate
  modified_base 9: mod_base = OTHER; note = 2'-deoxy-2'-fluorocytidine-3'-phosphate
  modified_base 10: mod_base = OTHER; note = 2'-deoxy-2'-fluorouridine-3'-phosphate
  modified_base 11: mod_base = OTHER; note = 2'-deoxy-2'-fluorocytidine-3'-phosphate
  modified_base 12: mod_base = OTHER; note = 2'-O-methyladenosine-3'-phosphate
  modified_base 13: mod_base = OTHER; note = 2'-O-methyladenosine-3'-phosphate
  modified_base 14: mod_base = OTHER; note = 2'-O-methyluridine-3'-phosphate
  modified_base 15: mod_base = OTHER; note = 2'-O-methyladenosine-3'-phosphate
  modified_base 16: mod_base = OTHER; note = 2'-O-methyladenosine-3'-phosphate
  modified_base 17: mod_base = OTHER; note = 2'-O-methyladenosine-3'-phosphate
  modified_base 18: mod_base = OTHER; note = 2'-O-methylguanosine-3'-phosphate
  modified_base 19: mod_base = OTHER; note = 2'-O-methyluridine-3'-phosphate
  modified_base 20: mod_base = OTHER; note = 2'-O-methylguanosine-3'-phosphate
  modified_base 21: mod_base = OTHER; note = 2'-O-methyladenosine-3'-phosphate ((2S,4R)-1-[29-[[2-(acetylamino)-2-deoxy-beta-D-galactopyra nosyl]oxy]-14,14-bis[[3-[[3-[[5-[[2-(acetylamino)-2-deoxy-b eta-D-galactopyranosyl]oxy]-1-oxopentyl]amino]propyl]amino] -3-oxopropoxy]methyl]-1,12,19,25-tetraoxo-16-oxa-13,20,24-t riazanonacos-1-yl]-4-hydroxy-2-pyrrolidinyl)methyl ester
cacagaaactcaataaagtga

SEQ ID NO: 54 - RNA, 23 nt, synthetic construct
  source 1..23: mol_type = other RNA
  modified_base 1: mod_base = OTHER; note = 2'-O-methyluridine-3'-phosphate 5'-(3,3,5,5-tetramethyl-1,2-dithiolan-4-yl thiophosphate)
  modified_base 2: mod_base = OTHER; note = 2'-deoxy-2'-fluorocytidine-3'-phosphate
  modified_base 3: mod_base = OTHER; note = 2'-O-methyladenosine-3'-phosphate
  modified_base 4: mod_base = OTHER; note = 2'-O-methylcytidine-3'-phosphate
  modified_base 5: mod_base = OTHER; note = 2'-O-methyluridine-3'-phosphate
  modified_base 6: mod_base = OTHER; note = 2'-deoxy-2'-fluorouridine-3'-phosphate
  modified_base 7: mod_base = OTHER; note = 2'-O-methyluridine-3'-phosphate
  modified_base 8: mod_base = OTHER; note = 2'-deoxy-2'-fluoroadenosine-3'-phosphate
  modified_base 9: mod_base = OTHER; note = 2'-deoxy-2'-fluorouridine-3'-phosphate
  modified_base 10: mod_base = OTHER; note = 2'-O-methyluridine-3'-phosphate
  modified_base 11: mod_base = OTHER; note = 2'-O-methylguanosine-3'-phosphate
  modified_base 12: mod_base = OTHER; note = 2'-O-methyladenosine-3'-phosphate
  modified_base 13: mod_base = OTHER; note = 2'-O-methylguanosine-3'-phosphate
  modified_base 14: mod_base = OTHER; note = 2'-deoxy-2'-fluorouridine-3'-phosphate
  modified_base 15: mod_base = OTHER; note = 2'-O-methyluridine-3'-phosphate
  modified_base 16: mod_base = OTHER; note = 2'-deoxy-2'-fluorouridine-3'-phosphate
  modified_base 17: mod_base = OTHER; note = 2'-O-methylcytidine-3'-phosphate
  modified_base 18: mod_base = OTHER; note = 2'-O-methyluridine-3'-phosphate
  modified_base 19: mod_base = OTHER; note = 2'-O-methylguanosine-3'-phosphate
  modified_base 20: mod_base = OTHER; note = 2'-O-methyluridine-3'-phosphate
  modified_base 21: mod_base = OTHER; note = 2'-O-methylguanosine-3'-phosphorothioate
  modified_base 22: mod_base = OTHER; note = 2'-O-methylcytidine-3'-phosphorothioate
  modified_base 23: mod_base = OTHER; note = 2'-O-methylcytidine
tcactttattgagtttctgtgcc

SEQ ID NO: 55 - RNA, 21 nt, synthetic construct
  source 1..21: mol_type = other RNA
  modified_base 1: mod_base = OTHER; note = 2'-O-methylcytidine-3'-phosphorothioate
  modified_base 2: mod_base = OTHER; note = 2'-O-methyladenosine-3'-phosphorothioate
  modified_base 3: mod_base = OTHER; note = 2'-O-methylcytidine-3'-phosphate
  modified_base 4: mod_base = OTHER; note = 2'-O-methyladenosine-3'-phosphate
  modified_base 5: mod_base = OTHER; note = 2'-O-methylguanosine-3'-phosphate
  modified_base 6: mod_base = OTHER; note = 2'-O-methyladenosine-3'-phosphate
  modified_base 7: mod_base = OTHER; note = 2'-deoxy-2'-fluoroadenosine-3'-phosphate
  modified_base 8: mod_base = OTHER; note = 2'-O-methyladenosine-3'-phosphate
  modified_base 9: mod_base = OTHER; note = 2'-deoxy-2'-fluorocytidine-3'-phosphate
  modified_base 10: mod_base = OTHER; note = 2'-deoxy-2'-fluorouridine-3'-phosphate
  modified_base 11: mod_base = OTHER; note = 2'-deoxy-2'-fluorocytidine-3'-phosphate
  modified_base 12: mod_base = OTHER; note = 2'-O-methyladenosine-3'-phosphate
  modified_base 13: mod_base = OTHER; note = 2'-O-methyladenosine-3'-phosphate
  modified_base 14: mod_base = OTHER; note = 2'-O-methyluridine-3'-phosphate
  modified_base 15: mod_base = OTHER; note = 2'-O-methyladenosine-3'-phosphate
  modified_base 16: mod_base = OTHER; note = 2'-O-methyladenosine-3'-phosphate
  modified_base 17: mod_base = OTHER; note = 2'-O-methyladenosine-3'-phosphate
  modified_base 18: mod_base = OTHER; note = 2'-O-methylguanosine-3'-phosphate
  modified_base 19: mod_base = OTHER; note = 2'-O-methyluridine-3'-phosphate
  modified_base 20: mod_base = OTHER; note = 2'-O-methylguanosine-3'-phosphate
  modified_base 21: mod_base = OTHER; note = 2'-O-methyladenosine-3'-phosphate ((2S,4R)-1-[29-[[2-(acetylamino)-2-deoxy-beta-D-galactopyra nosyl]oxy]-14,14-bis[[3-[[3-[[5-[[2-(acetylamino)-2-deoxy-b eta-D-galactopyranosyl]oxy]-1-oxopentyl]amino]propyl]amino] -3-oxopropoxy]methyl]-1,12,19,25-tetraoxo-16-oxa-13,20,24-t riazanonacos-1-yl]-4-hydroxy-2-pyrrolidinyl)methyl ester
cacagaaactcaataaagtga

SEQ ID NO: 56 - RNA, 23 nt, synthetic construct
  source 1..23: mol_type = other RNA
  modified_base 1: mod_base = OTHER; note = 2'-O-methyluridine-3'-phosphorothioate 5'-(trans-2-methoxycyclohex-1-yl phosphate)
  modified_base 2: mod_base = OTHER; note = 2'-deoxy-2'-fluorocytidine-3'-phosphorothioate
  modified_base 3: mod_base = OTHER; note = 2'-O-methyladenosine-3'-phosphate
  modified_base 4: mod_base = OTHER; note = 2'-O-methylcytidine-3'-phosphate
  modified_base 5: mod_base = OTHER; note = 2'-O-methyluridine-3'-phosphate
  modified_base 6: mod_base = OTHER; note = 2'-deoxy-2'-fluorouridine-3'-phosphate
  modified_base 7: mod_base = OTHER; note = 2'-O-methyluridine-3'-phosphate
  modified_base 8: mod_base = OTHER; note = 2'-deoxy-2'-fluoroadenosine-3'-phosphate
  modified_base 9: mod_base = OTHER; note = 2'-deoxy-2'-fluorouridine-3'-phosphate
  modified_base 10: mod_base = OTHER; note = 2'-O-methyluridine-3'-phosphate
  modified_base 11: mod_base = OTHER; note = 2'-O-methylguanosine-3'-phosphate
  modified_base 12: mod_base = OTHER; note = 2'-O-methyladenosine-3'-phosphate
  modified_base 13: mod_base = OTHER; note = 2'-O-methylguanosine-3'-phosphate
  modified_base 14: mod_base = OTHER; note = 2'-deoxy-2'-fluorouridine-3'-phosphate
  modified_base 15: mod_base = OTHER; note = 2'-O-methyluridine-3'-phosphate
  modified_base 16: mod_base = OTHER; note = 2'-deoxy-2'-fluorouridine-3'-phosphate
  modified_base 17: mod_base = OTHER; note = 2'-O-methylcytidine-3'-phosphate
  modified_base 18: mod_base = OTHER; note = 2'-O-methyluridine-3'-phosphate
  modified_base 19: mod_base = OTHER; note = 2'-O-methylguanosine-3'-phosphate
  modified_base 20: mod_base = OTHER; note = 2'-O-methyluridine-3'-phosphate
  modified_base 21: mod_base = OTHER; note = 2'-O-methylguanosine-3'-phosphorothioate
  modified_base 22: mod_base = OTHER; note = 2'-O-methylcytidine-3'-phosphorothioate
  modified_base 23: mod_base = OTHER; note = 2'-O-methylcytidine
tcactttattgagtttctgtgcc

SEQ ID NO: 57 - RNA, 23 nt, synthetic construct
  source 1..23: mol_type = other RNA
  modified_base 1: mod_base = OTHER; note = 2'-O-methyluridine-3'-phosphorothioate 5'-(trans-5-hydroxy-1,2-dithian-4-yl phosphate)
  modified_base 2: mod_base = OTHER; note = 2'-deoxy-2'-fluorocytidine-3'-phosphorothioate
  modified_base 3: mod_base = OTHER; note = 2'-O-methyladenosine-3'-phosphate
  modified_base 4: mod_base = OTHER; note = 2'-O-methylcytidine-3'-phosphate
  modified_base 5: mod_base = OTHER; note = 2'-O-methyluridine-3'-phosphate
  modified_base 6: mod_base = OTHER; note = 2'-deoxy-2'-fluorouridine-3'-phosphate
  modified_base 7: mod_base = OTHER; note = 2'-O-methyluridine-3'-phosphate
  modified_base 8: mod_base = OTHER; note = 2'-deoxy-2'-fluoroadenosine-3'-phosphate
  modified_base 9: mod_base = OTHER; note = 2'-deoxy-2'-fluorouridine-3'-phosphate
  modified_base 10: mod_base = OTHER; note = 2'-O-methyluridine-3'-phosphate
  modified_base 11: mod_base = OTHER; note = 2'-O-methylguanosine-3'-phosphate
  modified_base 12: mod_base = OTHER; note = 2'-O-methyladenosine-3'-phosphate
  modified_base 13: mod_base = OTHER; note = 2'-O-methylguanosine-3'-phosphate
  modified_base 14: mod_base = OTHER; note = 2'-deoxy-2'-fluorouridine-3'-phosphate
  modified_base 15: mod_base = OTHER; note = 2'-O-methyluridine-3'-phosphate
  modified_base 16: mod_base = OTHER; note = 2'-deoxy-2'-fluorouridine-3'-phosphate
  modified_base 17: mod_base = OTHER; note = 2'-O-methylcytidine-3'-phosphate
  modified_base 18: mod_base = OTHER; note = 2'-O-methyluridine-3'-phosphate
  modified_base 19: mod_base = OTHER; note = 2'-O-methylguanosine-3'-phosphate
  modified_base 20: mod_base = OTHER; note = 2'-O-methyluridine-3'-phosphate
  modified_base 21: mod_base = OTHER; note = 2'-O-methylguanosine-3'-phosphorothioate
  modified_base 22: mod_base = OTHER; note = 2'-O-methylcytidine-3'-phosphorothioate
  modified_base 23: mod_base = OTHER; note = 2'-O-methylcytidine
tcactttattgagtttctgtgcc

SEQ ID NO: 58 - RNA, 23 nt, synthetic construct
  source 1..23: mol_type = other RNA
  modified_base 1: mod_base = OTHER; note = 2'-O-methyluridine-3'-phosphorothioate 5'-(cis-3,3,5-trimethyl-1,2-dithiolan-4-yl thiophosphate)
  modified_base 2: mod_base = OTHER; note = 2'-deoxy-2'-fluorocytidine-3'-phosphorothioate
  modified_base 3: mod_base = OTHER; note = 2'-O-methyladenosine-3'-phosphate
  modified_base 4: mod_base = OTHER; note = 2'-O-methylcytidine-3'-phosphate
  modified_base 5: mod_base = OTHER; note = 2'-O-methyluridine-3'-phosphate
  modified_base 6: mod_base = OTHER; note = 2'-deoxy-2'-fluorouridine-3'-phosphate
  modified_base 7: mod_base = OTHER; note = 2'-O-methyluridine-3'-phosphate
  modified_base 8: mod_base = OTHER; note = 2'-deoxy-2'-fluoroadenosine-3'-phosphate
  modified_base 9: mod_base = OTHER; note = 2'-deoxy-2'-fluorouridine-3'-phosphate
  modified_base 10: mod_base = OTHER; note = 2'-O-methyluridine-3'-phosphate
  modified_base 11: mod_base = OTHER; note = 2'-O-methylguanosine-3'-phosphate
  modified_base 12: mod_base = OTHER; note = 2'-O-methyladenosine-3'-phosphate
  modified_base 13: mod_base = OTHER; note = 2'-O-methylguanosine-3'-phosphate
  modified_base 14: mod_base = OTHER; note = 2'-deoxy-2'-fluorouridine-3'-phosphate
  modified_base 15: mod_base = OTHER; note = 2'-O-methyluridine-3'-phosphate
  modified_base 16: mod_base = OTHER; note = 2'-deoxy-2'-fluorouridine-3'-phosphate
  modified_base 17: mod_base = OTHER; note = 2'-O-methylcytidine-3'-phosphate
  modified_base 18: mod_base = OTHER; note = 2'-O-methyluridine-3'-phosphate
  modified_base 19: mod_base = OTHER; note = 2'-O-methylguanosine-3'-phosphate
  modified_base 20: mod_base = OTHER; note = 2'-O-methyluridine-3'-phosphate
  modified_base 21: mod_base = OTHER; note = 2'-O-methylguanosine-3'-phosphorothioate
  modified_base 22: mod_base = OTHER; note = 2'-O-methylcytidine-3'-phosphorothioate
  modified_base 23: mod_base = OTHER; note = 2'-O-methylcytidine
tcactttattgagtttctgtgcc

SEQ ID NO: 59 - RNA, 23 nt, synthetic construct
  source 1..23: mol_type = other RNA
  modified_base 1: mod_base = OTHER; note = 2'-O-methyluridine-3'-phosphorothioate 5'-(3,3,5,5-tetramethyl-1,2-dithiolan-4-yl phosphate)
  modified_base 2: mod_base = OTHER; note = 2'-deoxy-2'-fluorocytidine-3'-phosphorothioate
  modified_base 3: mod_base = OTHER; note = 2'-O-methyladenosine-3'-phosphate
  modified_base 4: mod_base = OTHER; note = 2'-O-methylcytidine-3'-phosphate
  modified_base 5: mod_base = OTHER; note = 2'-O-methyluridine-3'-phosphate
  modified_base 6: mod_base = OTHER; note = 2'-deoxy-2'-fluorouridine-3'-phosphate
  modified_base 7: mod_base = OTHER; note = 2'-O-methyluridine-3'-phosphate
  modified_base 8: mod_base = OTHER; note = 2'-deoxy-2'-fluoroadenosine-3'-phosphate
  modified_base 9: mod_base = OTHER; note = 2'-deoxy-2'-fluorouridine-3'-phosphate
  modified_base 10: mod_base = OTHER; note = 2'-O-methyluridine-3'-phosphate
  modified_base 11: mod_base = OTHER; note = 2'-O-methylguanosine-3'-phosphate
  modified_base 12: mod_base = OTHER; note = 2'-O-methyladenosine-3'-phosphate
  modified_base 13: mod_base = OTHER; note = 2'-O-methylguanosine-3'-phosphate
  modified_base 14: mod_base = OTHER; note = 2'-deoxy-2'-fluorouridine-3'-phosphate
  modified_base 15: mod_base = OTHER; note = 2'-O-methyluridine-3'-phosphate
  modified_base 16: mod_base = OTHER; note = 2'-deoxy-2'-fluorouridine-3'-phosphate
  modified_base 17: mod_base = OTHER; note = 2'-O-methylcytidine-3'-phosphate
  modified_base 18: mod_base = OTHER; note = 2'-O-methyluridine-3'-phosphate
  modified_base 19: mod_base = OTHER; note = 2'-O-methylguanosine-3'-phosphate
  modified_base 20: mod_base = OTHER; note = 2'-O-methyluridine-3'-phosphate
  modified_base 21: mod_base = OTHER; note = 2'-O-methylguanosine-3'-phosphorothioate
  modified_base 22: mod_base = OTHER; note = 2'-O-methylcytidine-3'-phosphorothioate
  modified_base 23: mod_base = OTHER; note = 2'-O-methylcytidine
tcactttattgagtttctgtgcc

SEQ ID NO: 60 - RNA, 23 nt, synthetic construct
  source 1..23: mol_type = other RNA
  modified_base 1: mod_base = OTHER; note = 2'-O-methyluridine-3'-phosphorothioate 5'-(cis-3,3,5-trimethyl-1,2-dithiolan-4-yl phosphate)
  modified_base 2: mod_base = OTHER; note = 2'-deoxy-2'-fluorocytidine-3'-phosphorothioate
  modified_base 3: mod_base = OTHER; note = 2'-O-methyladenosine-3'-phosphate
  modified_base 4: mod_base = OTHER; note = 2'-O-methylcytidine-3'-phosphate
  modified_base 5: mod_base = OTHER; note = 2'-O-methyluridine-3'-phosphate
  modified_base 6: mod_base = OTHER; note = 2'-deoxy-2'-fluorouridine-3'-phosphate
  modified_base 7: mod_base = OTHER; note = 2'-O-methyluridine-3'-phosphate
  modified_base 8: mod_base = OTHER; note = 2'-deoxy-2'-fluoroadenosine-3'-phosphate
  modified_base 9: mod_base = OTHER; note = 2'-deoxy-2'-fluorouridine-3'-phosphate
  modified_base 10: mod_base = OTHER; note = 2'-O-methyluridine-3'-phosphate
  modified_base 11: mod_base = OTHER; note = 2'-O-methylguanosine-3'-phosphate
  modified_base 12: mod_base = OTHER; note = 2'-O-methyladenosine-3'-phosphate
  modified_base 13: mod_base = OTHER; note = 2'-O-methylguanosine-3'-phosphate
  modified_base 14: mod_base = OTHER; note = 2'-deoxy-2'-fluorouridine-3'-phosphate
  modified_base 15: mod_base = OTHER; note = 2'-O-methyluridine-3'-phosphate
  modified_base 16: mod_base = OTHER; note = 2'-deoxy-2'-fluorouridine-3'-phosphate
  modified_base 17: mod_base = OTHER; note = 2'-O-methylcytidine-3'-phosphate
  modified_base 18: mod_base = OTHER; note = 2'-O-methyluridine-3'-phosphate
  modified_base 19: mod_base = OTHER; note = 2'-O-methylguanosine-3'-phosphate
  modified_base 20: mod_base = OTHER; note = 2'-O-methyluridine-3'-phosphate
  modified_base 21: mod_base = OTHER; note = 2'-O-methylguanosine-3'-phosphorothioate
  modified_base 22: mod_base = OTHER; note = 2'-O-methylcytidine-3'-phosphorothioate
  modified_base 23: mod_base = OTHER; note = 2'-O-methylcytidine
tcactttattgagtttctgtgcc

SEQ ID NO: 61 - RNA, 23 nt, synthetic construct
  source 1..23: mol_type = other RNA
  modified_base 1: mod_base = OTHER; note = 2'-O-methyluridine-3'-phosphorothioate 5'-(trans-2-methoxycyclohex-1-yl thiophosphate)
  modified_base 2: mod_base = OTHER; note = 2'-deoxy-2'-fluorocytidine-3'-phosphorothioate
  modified_base 3: mod_base = OTHER; note = 2'-O-methyladenosine-3'-phosphate
  modified_base 4: mod_base = OTHER; note = 2'-O-methylcytidine-3'-phosphate
  modified_base 5: mod_base = OTHER; note = 2'-O-methyluridine-3'-phosphate
  modified_base 6: mod_base = OTHER; note = 2'-deoxy-2'-fluorouridine-3'-phosphate
  modified_base 7: mod_base = OTHER; note = 2'-O-methyluridine-3'-phosphate
  modified_base 8: mod_base = OTHER; note = 2'-deoxy-2'-fluoroadenosine-3'-phosphate
  modified_base 9: mod_base = OTHER; note = 2'-deoxy-2'-fluorouridine-3'-phosphate
  modified_base 10: mod_base = OTHER; note = 2'-O-methyluridine-3'-phosphate
  modified_base 11: mod_base = OTHER; note = 2'-O-methylguanosine-3'-phosphate
  modified_base 12: mod_base = OTHER; note = 2'-O-methyladenosine-3'-phosphate
  modified_base 13: mod_base = OTHER; note = 2'-O-methylguanosine-3'-phosphate
  modified_base 14: mod_base = OTHER; note = 2'-deoxy-2'-fluorouridine-3'-phosphate
  modified_base 15: mod_base = OTHER; note = 2'-O-methyluridine-3'-phosphate
  modified_base 16: mod_base = OTHER; note = 2'-deoxy-2'-fluorouridine-3'-phosphate
  modified_base 17: mod_base = OTHER; note = 2'-O-methylcytidine-3'-phosphate
  modified_base 18: mod_base = OTHER; note = 2'-O-methyluridine-3'-phosphate
  modified_base 19: mod_base = OTHER; note = 2'-O-methylguanosine-3'-phosphate
  modified_base 20: mod_base = OTHER; note = 2'-O-methyluridine-3'-phosphate
  modified_base 21: mod_base = OTHER; note = 2'-O-methylguanosine-3'-phosphorothioate
  modified_base 22: mod_base = OTHER; note = 2'-O-methylcytidine-3'-phosphorothioate
  modified_base 23: mod_base = OTHER; note = 2'-O-methylcytidine
tcactttattgagtttctgtgcc

SEQ ID NO: 62 - RNA, 23 nt, synthetic construct
  source 1..23: mol_type = other RNA
  modified_base 1: mod_base = OTHER; note = 2'-O-methyluridine-3'-phosphorothioate 5'-(trans-5-hydroxy-1,2-dithian-4-yl thiophosphate)
  modified_base 2: mod_base = OTHER; note = 2'-deoxy-2'-fluorocytidine-3'-phosphorothioate
  modified_base 3: mod_base = OTHER; note = 2'-O-methyladenosine-3'-phosphate
  modified_base 4: mod_base = OTHER; note = 2'-O-methylcytidine-3'-phosphate
  modified_base 5: mod_base = OTHER; note = 2'-O-methyluridine-3'-phosphate
  modified_base 6: mod_base = OTHER; note = 2'-deoxy-2'-fluorouridine-3'-phosphate
  modified_base 7: mod_base = OTHER; note = 2'-O-methyluridine-3'-phosphate
  modified_base 8: mod_base = OTHER; note = 2'-deoxy-2'-fluoroadenosine-3'-phosphate
  modified_base 9: mod_base = OTHER; note = 2'-deoxy-2'-fluorouridine-3'-phosphate
  modified_base 10: mod_base = OTHER; note = 2'-O-methyluridine-3'-phosphate
  modified_base 11: mod_base = OTHER; note = 2'-O-methylguanosine-3'-phosphate
  modified_base 12: mod_base = OTHER; note = 2'-O-methyladenosine-3'-phosphate
  modified_base 13: mod_base = OTHER; note = 2'-O-methylguanosine-3'-phosphate
  modified_base 14: mod_base = OTHER; note = 2'-deoxy-2'-fluorouridine-3'-phosphate
  modified_base 15: mod_base = OTHER; note = 2'-O-methyluridine-3'-phosphate
  modified_base 16: mod_base = OTHER; note = 2'-deoxy-2'-fluorouridine-3'-phosphate
  modified_base 17: mod_base = OTHER; note = 2'-O-methylcytidine-3'-phosphate
  modified_base 18: mod_base = OTHER; note = 2'-O-methyluridine-3'-phosphate
  modified_base 19: mod_base = OTHER; note = 2'-O-methylguanosine-3'-phosphate
  modified_base 20: mod_base = OTHER; note = 2'-O-methyluridine-3'-phosphate
  modified_base 21: mod_base = OTHER; note = 2'-O-methylguanosine-3'-phosphorothioate
  modified_base 22: mod_base = OTHER; note = 2'-O-methylcytidine-3'-phosphorothioate
  modified_base 23: mod_base = OTHER; note = 2'-O-methylcytidine
tcactttattgagtttctgtgcc

SEQ ID NO: 63 - RNA, 23 nt, synthetic construct
  source 1..23: mol_type = other RNA
  modified_base 1: mod_base = OTHER; note = 2'-O-methyluridine-3'-phosphorothioate 5'-(3,3,5,5-tetramethyl-1,2-dithiolan-4-yl thiophosphate)
  modified_base 2: mod_base = OTHER; note = 2'-deoxy-2'-fluorocytidine-3'-phosphorothioate
  modified_base 3: mod_base = OTHER; note = 2'-O-methyladenosine-3'-phosphate
  modified_base 4: mod_base = OTHER; note = 2'-O-methylcytidine-3'-phosphate
  modified_base 5: mod_base = OTHER; note = 2'-O-methyluridine-3'-phosphate
  modified_base 6: mod_base = OTHER; note = 2'-deoxy-2'-fluorouridine-3'-phosphate
  modified_base 7: mod_base = OTHER; note = 2'-O-methyluridine-3'-phosphate
  modified_base 8: mod_base = OTHER; note = 2'-deoxy-2'-fluoroadenosine-3'-phosphate
  modified_base 9: mod_base = OTHER; note = 2'-deoxy-2'-fluorouridine-3'-phosphate
  modified_base 10: mod_base = OTHER; note = 2'-O-methyluridine-3'-phosphate
  modified_base 11: mod_base = OTHER; note = 2'-O-methylguanosine-3'-phosphate
  modified_base 12: mod_base = OTHER; note = 2'-O-methyladenosine-3'-phosphate
  modified_base 13: mod_base = OTHER; note = 2'-O-methylguanosine-3'-phosphate
  modified_base 14: mod_base = OTHER; note = 2'-deoxy-2'-fluorouridine-3'-phosphate
  modified_base 15: mod_base = OTHER; note = 2'-O-methyluridine-3'-phosphate
  modified_base 16: mod_base = OTHER; note = 2'-deoxy-2'-fluorouridine-3'-phosphate
  modified_base 17: mod_base = OTHER; note = 2'-O-methylcytidine-3'-phosphate
  modified_base 18: mod_base = OTHER; note = 2'-O-methyluridine-3'-phosphate
  modified_base 19: mod_base = OTHER; note = 2'-O-methylguanosine-3'-phosphate
  modified_base 20: mod_base = OTHER; note = 2'-O-methyluridine-3'-phosphate
  modified_base 21: mod_base = OTHER; note = 2'-O-methylguanosine-3'-phosphorothioate
  modified_base 22: mod_base = OTHER; note = 2'-O-methylcytidine-3'-phosphorothioate
  modified_base 23: mod_base = OTHER; note = 2'-O-methylcytidine
tcactttattgagtttctgtgcc

SEQ ID NO: 64 - RNA, 23 nt, synthetic construct
  source 1..23: mol_type = other RNA
  modified_base 1: mod_base = OTHER; note = 2'-O-methyluridine-3'-phosphate 5'-(trans-2-methoxycyclohex-1-yl thiophosphate)
  modified_base 2: mod_base = OTHER; note = 2'-deoxy-2'-fluorocytidine-3'-phosphate
  modified_base 3: mod_base = OTHER; note = 2'-O-methyladenosine-3'-phosphate
  modified_base 4: mod_base = OTHER; note = 2'-O-methylcytidine-3'-phosphate
  modified_base 5: mod_base = OTHER; note = 2'-O-methyluridine-3'-phosphate
  modified_base 6: mod_base = OTHER; note = 2'-deoxy-2'-fluorouridine-3'-phosphate
  modified_base 7: mod_base = OTHER; note = 2'-O-methyluridine-3'-phosphate
  modified_base 8: mod_base = OTHER; note = 2'-deoxy-2'-fluoroadenosine-3'-phosphate
  modified_base 9: mod_base = OTHER; note = 2'-deoxy-2'-fluorouridine-3'-phosphate
  modified_base 10: mod_base = OTHER; note = 2'-O-methyluridine-3'-phosphate
  modified_base 11: mod_base = OTHER; note = 2'-O-methylguanosine-3'-phosphate
  modified_base 12: mod_base = OTHER; note = 2'-O-methyladenosine-3'-phosphate
  modified_base 13: mod_base = OTHER; note = 2'-O-methylguanosine-3'-phosphate
  modified_base 14: mod_base = OTHER; note = 2'-deoxy-2'-fluorouridine-3'-phosphate
  modified_base 15: mod_base = OTHER; note = 2'-O-methyluridine-3'-phosphate
  modified_base 16: mod_base = OTHER; note = 2'-deoxy-2'-fluorouridine-3'-phosphate
  modified_base 17: mod_base = OTHER; note = 2'-O-methylcytidine-3'-phosphate
  modified_base 18: mod_base = OTHER; note = 2'-O-methyluridine-3'-phosphate
  modified_base 19: mod_base = OTHER; note = 2'-O-methylguanosine-3'-phosphate
  modified_base 20: mod_base = OTHER; note = 2'-O-methyluridine-3'-phosphate
  modified_base 21: mod_base = OTHER; note = 2'-O-methylguanosine-3'-phosphorothioate
  modified_base 22: mod_base = OTHER; note = 2'-O-methylcytidine-3'-phosphorothioate
  modified_base 23: mod_base = OTHER; note = 2'-O-methylcytidine
tcactttattgagtttctgtgcc

SEQ ID NO: 65 - RNA, 23 nt, synthetic construct
  source 1..23: mol_type = other RNA
  modified_base 1: mod_base = OTHER; note = 2'-O-methyluridine-3'-phosphate 5'-(3,3,5,5-tetramethyl-1,2-dithiolan-4-yl thiophosphate)
  modified_base 2: mod_base = OTHER; note = 2'-deoxy-2'-fluorocytidine-3'-phosphate
  modified_base 3: mod_base = OTHER; note = 2'-O-methyladenosine-3'-phosphate
  modified_base 4: mod_base = OTHER; note = 2'-O-methylcytidine-3'-phosphate
  modified_base 5: mod_base = OTHER; note = 2'-O-methyluridine-3'-phosphate
  modified_base 6: mod_base = OTHER; note = 2'-deoxy-2'-fluorouridine-3'-phosphate
  modified_base 7: mod_base = OTHER; note = 2'-O-methyluridine-3'-phosphate
  modified_base 8: mod_base = OTHER; note = 2'-deoxy-2'-fluoroadenosine-3'-phosphate
  modified_base 9: mod_base = OTHER; note = 2'-deoxy-2'-fluorouridine-3'-phosphate
  modified_base 10: mod_base = OTHER; note = 2'-O-methyluridine-3'-phosphate
  modified_base 11: mod_base = OTHER; note = 2'-O-methylguanosine-3'-phosphate
  modified_base 12: mod_base = OTHER; note = 2'-O-methyladenosine-3'-phosphate
  modified_base 13: mod_base = OTHER; note = 2'-O-methylguanosine-3'-phosphate
  modified_base 14: mod_base = OTHER; note = 2'-deoxy-2'-fluorouridine-3'-phosphate
  modified_base 15: mod_base = OTHER; note = 2'-O-methyluridine-3'-phosphate
  modified_base 16: mod_base = OTHER; note = 2'-deoxy-2'-fluorouridine-3'-phosphate
  modified_base 17: mod_base = OTHER; note = 2'-O-methylcytidine-3'-phosphate
  modified_base 18: mod_base = OTHER; note = 2'-O-methyluridine-3'-phosphate
  modified_base 19: mod_base = OTHER; note = 2'-O-methylguanosine-3'-phosphate
  modified_base 20: mod_base = OTHER; note = 2'-O-methyluridine-3'-phosphate
  modified_base 21: mod_base = OTHER; note = 2'-O-methylguanosine-3'-phosphorothioate
  modified_base 22: mod_base = OTHER; note = 2'-O-methylcytidine-3'-phosphorothioate
  modified_base 23: mod_base = OTHER; note = 2'-O-methylcytidine
tcactttattgagtttctgtgcc

SEQ ID NO: 66 - RNA, 23 nt, synthetic construct
  source 1..23: mol_type = other RNA
  modified_base 1: mod_base = OTHER; note = 2'-O-methyluridine-3'-phosphate 5'-(trans-5-hydroxy-1,2-dithian-4-yl thiophosphate)
  modified_base 2: mod_base = OTHER; note = 2'-deoxy-2'-fluorocytidine-3'-phosphate
  modified_base 3: mod_base = OTHER; note = 2'-O-methyladenosine-3'-phosphate
  modified_base 4: mod_base = OTHER; note = 2'-O-methylcytidine-3'-phosphate
  modified_base 5: mod_base = OTHER; note = 2'-O-methyluridine-3'-phosphate
  modified_base 6: mod_base = OTHER; note = 2'-deoxy-2'-fluorouridine-3'-phosphate
  modified_base 7: mod_base = OTHER; note = 2'-O-methyluridine-3'-phosphate
  modified_base 8: mod_base = OTHER; note = 2'-deoxy-2'-fluoroadenosine-3'-phosphate
  modified_base 9: mod_base = OTHER; note = 2'-deoxy-2'-fluorouridine-3'-phosphate
  modified_base 10: mod_base = OTHER; note = 2'-O-methyluridine-3'-phosphate
  modified_base 11: mod_base = OTHER; note = 2'-O-methylguanosine-3'-phosphate
  modified_base 12: mod_base = OTHER; note = 2'-O-methyladenosine-3'-phosphate
  modified_base 13: mod_base = OTHER; note = 2'-O-methylguanosine-3'-phosphate
  modified_base 14: mod_base = OTHER; note = 2'-deoxy-2'-fluorouridine-3'-phosphate
  modified_base 15: mod_base = OTHER; note = 2'-O-methyluridine-3'-phosphate
  modified_base 16: mod_base = OTHER; note = 2'-deoxy-2'-fluorouridine-3'-phosphate
  modified_base 17: mod_base = OTHER; note = 2'-O-methylcytidine-3'-phosphate
  modified_base 18: mod_base = OTHER; note = 2'-O-methyluridine-3'-phosphate
  modified_base 19: mod_base = OTHER; note = 2'-O-methylguanosine-3'-phosphate
  modified_base 20: mod_base = OTHER; note = 2'-O-methyluridine-3'-phosphate
  modified_base 21: mod_base = OTHER; note = 2'-O-methylguanosine-3'-phosphorothioate
  modified_base 22: mod_base = OTHER; note = 2'-O-methylcytidine-3'-phosphorothioate
  modified_base 23: mod_base = OTHER; note = 2'-O-methylcytidine
tcactttattgagtttctgtgcc

SEQ ID NO: 67 - RNA, 23 nt, synthetic construct
  source 1..23: mol_type = other RNA
  modified_base 1: mod_base = OTHER; note = 2'-O-methyluridine-3'-phosphate 5'-(cis-3,3,5-trimethyl-1,2-dithiolan-4-yl thiophosphate)
  modified_base 2: mod_base = OTHER; note = 2'-deoxy-2'-fluorocytidine-3'-phosphate
  modified_base 3: mod_base = OTHER; note = 2'-O-methyladenosine-3'-phosphate
  modified_base 4: mod_base = OTHER; note = 2'-O-methylcytidine-3'-phosphate
  modified_base 5: mod_base = OTHER; note = 2'-O-methyluridine-3'-phosphate
  modified_base 6: mod_base = OTHER; note = 2'-deoxy-2'-fluorouridine-3'-phosphate
  modified_base 7: mod_base = OTHER; note = 2'-O-methyluridine-3'-phosphate
  modified_base 8: mod_base = OTHER; note = 2'-deoxy-2'-fluoroadenosine-3'-phosphate
  modified_base 9: mod_base = OTHER; note = 2'-deoxy-2'-fluorouridine-3'-phosphate
  modified_base 10: mod_base = OTHER; note = 2'-O-methyluridine-3'-phosphate
  modified_base 11: mod_base = OTHER; note = 2'-O-methylguanosine-3'-phosphate
  modified_base 12: mod_base = OTHER; note = 2'-O-methyladenosine-3'-phosphate
  modified_base 13: mod_base = OTHER; note = 2'-O-methylguanosine-3'-phosphate
  modified_base 14: mod_base = OTHER; note = 2'-deoxy-2'-fluorouridine-3'-phosphate
  modified_base 15: mod_base = OTHER; note = 2'-O-methyluridine-3'-phosphate
  modified_base 16: mod_base = OTHER; note = 2'-deoxy-2'-fluorouridine-3'-phosphate
  modified_base 17: mod_base = OTHER; note = 2'-O-methylcytidine-3'-phosphate
  modified_base 18: mod_base = OTHER; note = 2'-O-methyluridine-3'-phosphate
  modified_base 19: mod_base = OTHER; note = 2'-O-methylguanosine-3'-phosphate
  modified_base 20: mod_base = OTHER; note = 2'-O-methyluridine-3'-phosphate
  modified_base 21: mod_base = OTHER; note = 2'-O-methylguanosine-3'-phosphorothioate
  modified_base 22: mod_base = OTHER; note = 2'-O-methylcytidine-3'-phosphorothioate
  modified_base 23: mod_base = OTHER; note = 2'-O-methylcytidine
tcactttattgagtttctgtgcc

SEQ ID NO: 68 - RNA, 23 nt, synthetic construct
  source 1..23: mol_type = other RNA
  modified_base 1: mod_base = OTHER; note = 2'-O-methyluridine-3'-phosphate 5'-(trans-5-methoxy-1,2-dithian-4-yl thiophosphate)
  modified_base 2: mod_base = OTHER; note = 2'-deoxy-2'-fluorocytidine-3'-phosphate
  modified_base 3: mod_base = OTHER; note = 2'-O-methyladenosine-3'-phosphate
  modified_base 4: mod_base = OTHER; note = 2'-O-methylcytidine-3'-phosphate
  modified_base 5: mod_base = OTHER; note = 2'-O-methyluridine-3'-phosphate
  modified_base 6: mod_base = OTHER; note = 2'-deoxy-2'-fluorouridine-3'-phosphate
  modified_base 7: mod_base = OTHER; note = 2'-O-methyluridine-3'-phosphate
  modified_base 8: mod_base = OTHER; note = 2'-deoxy-2'-fluoroadenosine-3'-phosphate
  modified_base 9: mod_base = OTHER; note = 2'-deoxy-2'-fluorouridine-3'-phosphate
  modified_base 10: mod_base = OTHER; note = 2'-O-methyluridine-3'-phosphate
  modified_base 11: mod_base = OTHER; note = 2'-O-methylguanosine-3'-phosphate
  modified_base 12: mod_base = OTHER; note = 2'-O-methyladenosine-3'-phosphate
  modified_base 13: mod_base = OTHER; note = 2'-O-methylguanosine-3'-phosphate
  modified_base 14: mod_base = OTHER; note = 2'-deoxy-2'-fluorouridine-3'-phosphate
  modified_base 15: mod_base = OTHER; note = 2'-O-methyluridine-3'-phosphate
  modified_base 16: mod_base = OTHER; note = 2'-deoxy-2'-fluorouridine-3'-phosphate
  modified_base 17: mod_base = OTHER; note = 2'-O-methylcytidine-3'-phosphate
  modified_base 18: mod_base = OTHER; note = 2'-O-methyluridine-3'-phosphate
  modified_base 19: mod_base = OTHER; note = 2'-O-methylguanosine-3'-phosphate
  modified_base 20: mod_base = OTHER; note = 2'-O-methyluridine-3'-phosphate
  modified_base 21: mod_base = OTHER; note = 2'-O-methylguanosine-3'-phosphorothioate
  modified_base 22: mod_base = OTHER; note = 2'-O-methylcytidine-3'-phosphorothioate
  modified_base 23: mod_base = OTHER; note = 2'-O-methylcytidine
tcactttattgagtttctgtgcc

SEQ ID NO: 69 - RNA, 23 nt, synthetic construct
  source 1..23: mol_type = other RNA
  modified_base 1: mod_base = OTHER; note = 2'-O-methyluridine-3'-phosphorothioate
  modified_base 2: mod_base = OTHER; note = 2'-deoxy-2'-fluorocytidine-3'-phosphorothioate
  modified_base 3: mod_base = OTHER; note = 2'-O-methyladenosine-3'-phosphate
  modified_base 4: mod_base = OTHER; note = 2'-O-methylcytidine-3'-phosphate
  modified_base 5: mod_base = OTHER; note = 2'-O-methyluridine-3'-phosphate
  modified_base 6: mod_base = OTHER; note = 2'-deoxy-2'-fluorouridine-3'-phosphate
  modified_base 7: mod_base = OTHER; note = 2'-O-methyluridine-3'-phosphate
  modified_base 8: mod_base = OTHER; note = 2'-deoxy-2'-fluoroadenosine-3'-phosphate
  modified_base 9: mod_base = OTHER; note = 2'-deoxy-2'-fluorouridine-3'-phosphate
  modified_base 10: mod_base = OTHER; note = 2'-O-methyluridine-3'-phosphate
  modified_base 11: mod_base = OTHER; note = 2'-O-methylguanosine-3'-phosphate
  modified_base 12: mod_base = OTHER; note = 2'-O-methyladenosine-3'-phosphate
  modified_base 13: mod_base = OTHER; note = 2'-O-methylguanosine-3'-phosphate
  modified_base 14: mod_base = OTHER; note = 2'-deoxy-2'-fluorouridine-3'-phosphate
  modified_base 15: mod_base = OTHER; note = 2'-O-methyluridine-3'-phosphate
  modified_base 16: mod_base = OTHER; note = 2'-deoxy-2'-fluorouridine-3'-phosphate
  modified_base 17: mod_base = OTHER; note = 2'-O-methylcytidine-3'-phosphate
  modified_base 18: mod_base = OTHER; note = 2'-O-methyluridine-3'-phosphate
  modified_base 19: mod_base = OTHER; note = 2'-O-methylguanosine-3'-phosphate
  modified_base 20: mod_base = OTHER; note = 2'-O-methyluridine-3'-phosphate
  modified_base 21: mod_base = OTHER; note = 2'-O-methylguanosine-3'-phosphorothioate
  modified_base 22: mod_base = OTHER; note = 2'-O-methylcytidine-3'-phosphorothioate
  modified_base 23: mod_base = OTHER; note = 2'-O-methylcytidine
tcactttattgagtttctgtgcc

SEQ ID NO: 70 - RNA, 23 nt, synthetic construct
  source 1..23: mol_type = other RNA
  modified_base 1: mod_base = OTHER; note = 2'-O-methyluridine-3'-phosphate 5'-(E)-Vinylphosphonate
  modified_base 2: mod_base = OTHER; note = 2'-deoxy-2'-fluorocytidine-3'-phosphate
  modified_base 3: mod_base = OTHER; note = 2'-O-methyladenosine-3'-phosphate
  modified_base 4: mod_base = OTHER; note = 2'-O-methylcytidine-3'-phosphate
  modified_base 5: mod_base = OTHER; note = 2'-O-methyluridine-3'-phosphate
  modified_base 6: mod_base = OTHER; note = 2'-deoxy-2'-fluorouridine-3'-phosphate
  modified_base 7: mod_base = OTHER; note = 2'-O-methyluridine-3'-phosphate
  modified_base 8: mod_base = OTHER; note = 2'-deoxy-2'-fluoroadenosine-3'-phosphate
  modified_base 9: mod_base = OTHER; note = 2'-deoxy-2'-fluorouridine-3'-phosphate
  modified_base 10: mod_base = OTHER; note = 2'-O-methyluridine-3'-phosphate
  modified_base 11: mod_base = OTHER; note = 2'-O-methylguanosine-3'-phosphate
  modified_base 12: mod_base = OTHER; note = 2'-O-methyladenosine-3'-phosphate
  modified_base 13: mod_base = OTHER; note = 2'-O-methylguanosine-3'-phosphate
  modified_base 14: mod_base = OTHER; note = 2'-deoxy-2'-fluorouridine-3'-phosphate
  modified_base 15: mod_base = OTHER; note = 2'-O-methyluridine-3'-phosphate
  modified_base 16: mod_base = OTHER; note = 2'-deoxy-2'-fluorouridine-3'-phosphate
  modified_base 17: mod_base = OTHER; note = 2'-O-methylcytidine-3'-phosphate
  modified_base 18: mod_base = OTHER; note = 2'-O-methyluridine-3'-phosphate
  modified_base 19: mod_base = OTHER; note = 2'-O-methylguanosine-3'-phosphate
  modified_base 20: mod_base = OTHER; note = 2'-O-methyluridine-3'-phosphate
  modified_base 21: mod_base = OTHER; note = 2'-O-methylguanosine-3'-phosphorothioate
  modified_base 22: mod_base = OTHER; note = 2'-O-methylcytidine-3'-phosphorothioate
  modified_base 23: mod_base = OTHER; note = 2'-O-methylcytidine
tcactttattgagtttctgtgcc

SEQ ID NO: 71 - RNA, 21 nt, synthetic construct
  source 1..21: mol_type = other RNA
  modified_base 1: mod_base = OTHER; note = 2'-O-methylcytidine-3'-phosphorothioate
  modified_base 2: mod_base = OTHER; note = 2'-O-methyladenosine-3'-phosphorothioate
  modified_base 3: mod_base = OTHER; note = 2'-O-methylcytidine-3'-phosphate
  modified_base 4: mod_base = OTHER; note = 2'-O-methyladenosine-3'-phosphate
  modified_base 5: mod_base = OTHER; note = 2'-O-methylguanosine-3'-phosphate
  modified_base 6: mod_base = OTHER; note = 2'-O-methyladenosine-3'-phosphate
  modified_base 7: mod_base = OTHER; note = 2'-deoxy-2'-fluoroadenosine-3'-phosphate
  modified_base 8: mod_base = OTHER; note = 2'-O-methyladenosine-3'-phosphate
  modified_base 9: mod_base = OTHER; note = 2'-deoxy-2'-fluorocytidine-3'-phosphate
  modified_base 10: mod_base = OTHER; note = 2'-deoxy-2'-fluorouridine-3'-phosphate
  modified_base 11: mod_base = OTHER; note = 2'-deoxy-2'-fluorocytidine-3'-phosphate
  modified_base 12: mod_base = OTHER; note = 2'-O-methyladenosine-3'-phosphate
  modified_base 13: mod_base = OTHER; note = 2'-O-methyladenosine-3'-phosphate
  modified_base 14: mod_base = OTHER; note = 2'-O-methyluridine-3'-phosphate
  modified_base 15: mod_base = OTHER; note = 2'-O-methyladenosine-3'-phosphate
  modified_base 16: mod_base = OTHER; note = 2'-O-methyladenosine-3'-phosphate
  modified_base 17: mod_base = OTHER; note = 2'-O-methyladenosine-3'-phosphate
  modified_base 18: mod_base = OTHER; note = 2'-O-methylguanosine-3'-phosphate
  modified_base 19: mod_base = OTHER; note = 2'-O-methyluridine-3'-phosphate
  modified_base 20: mod_base = OTHER; note = 2'-O-methylguanosine-3'-phosphate
  modified_base 21: mod_base = OTHER; note = 2'-O-methyladenosine-3'-phosphate ((2S,4R)-1-[29-[[2-(acetylamino)-2-deoxy-beta-D-galactopyra nosyl]oxy]-14,14-bis[[3-[[3-[[5-[[2-(acetylamino)-2-deoxy-b eta-D-galactopyranosyl]oxy]-1-oxopentyl]amino]propyl]amino] -3-oxopropoxy]methyl]-1,12,19,25-tetraoxo-16-oxa-13,20,24-t riazanonacos-1-yl]-4-hydroxy-2-pyrrolidinyl)methyl ester
cacagaaactcaataaagtga

SEQ ID NO: 72 - RNA, 23 nt, synthetic construct
  source 1..23: mol_type = other RNA
  modified_base 1: mod_base = OTHER; note = 2'-O-methyluridine-3'-phosphorothioate
  modified_base 2: mod_base = OTHER; note = 2'-deoxy-2'-fluorocytidine-3'-phosphorothioate
  modified_base 3: mod_base = OTHER; note = 2'-O-methyladenosine-3'-phosphate
  modified_base 4: mod_base = OTHER; note = 2'-O-methylcytidine-3'-phosphate
  modified_base 5: mod_base = OTHER; note = 2'-O-methyluridine-3'-phosphate
  modified_base 6: mod_base = OTHER; note = 2'-deoxy-2'-fluorouridine-3'-phosphate
  modified_base 7: mod_base = OTHER; note = 2'-O-methyluridine-3'-phosphate
  modified_base 8: mod_base = OTHER; note = 2'-deoxy-2'-fluoroadenosine-3'-phosphate
  modified_base 9: mod_base = OTHER; note = 2'-deoxy-2'-fluorouridine-3'-phosphate
  modified_base 10: mod_base = OTHER; note = 2'-O-methyluridine-3'-phosphate
  modified_base 11: mod_base = OTHER; note = 2'-O-methylguanosine-3'-phosphate
  modified_base 12: mod_base = OTHER; note = 2'-O-methyladenosine-3'-phosphate
  modified_base 13: mod_base = OTHER; note = 2'-O-methylguanosine-3'-phosphate
  modified_base 14: mod_base = OTHER; note = 2'-deoxy-2'-fluorouridine-3'-phosphate
  modified_base 15: mod_base = OTHER; note = 2'-O-methyluridine-3'-phosphate
  modified_base 16: mod_base = OTHER; note = 2'-deoxy-2'-fluorouridine-3'-phosphate
  modified_base 17: mod_base = OTHER; note = 2'-O-methylcytidine-3'-phosphate
  modified_base 18: mod_base = OTHER; note = 2'-O-methyluridine-3'-phosphate
  modified_base 19: mod_base = OTHER; note = 2'-O-methylguanosine-3'-phosphate
  modified_base 20: mod_base = OTHER; note = 2'-O-methyluridine-3'-phosphate
  modified_base 21: mod_base = OTHER; note = 2'-O-methylguanosine-3'-phosphorothioate
  modified_base 22: mod_base = OTHER; note = 2'-O-methylcytidine-3'-phosphorothioate
  modified_base 23: mod_base = OTHER; note = 2'-O-methylcytidine
tcactttattgagtttctgtgcc

SEQ ID NO: 73 - RNA, 21 nt, synthetic construct
  source 1..21: mol_type = other RNA
  modified_base 1: mod_base = OTHER; note = 2'-O-methylcytidine-3'-phosphorothioate
  modified_base 2: mod_base = OTHER; note = 2'-O-methyladenosine-3'-phosphorothioate
  modified_base 3: mod_base = OTHER; note = 2'-O-methylcytidine-3'-phosphate
  modified_base 4: mod_base = OTHER; note = 2'-O-methyladenosine-3'-phosphate
  modified_base 5: mod_base = OTHER; note = 2'-O-methylguanosine-3'-phosphate
  modified_base 6: mod_base = OTHER; note = 2'-O-methyladenosine-3'-phosphate
  modified_base 7: mod_base = OTHER; note = 2'-deoxy-2'-fluoroadenosine-3'-phosphate
  modified_base 8: mod_base = OTHER; note = 2'-O-methyladenosine-3'-phosphate
  modified_base 9: mod_base = OTHER; note = 2'-deoxy-2'-fluorocytidine-3'-phosphate
  modified_base 10: mod_base = OTHER; note = 2'-deoxy-2'-fluorouridine-3'-phosphate
  modified_base 11: mod_base = OTHER; note = 2'-deoxy-2'-fluorocytidine-3'-phosphate
  modified_base 12: mod_base = OTHER; note = 2'-O-methyladenosine-3'-phosphate
  modified_base 13: mod_base = OTHER; note = 2'-O-methyladenosine-3'-phosphate
  modified_base 14: mod_base = OTHER; note = 2'-O-methyluridine-3'-phosphate
  modified_base 15: mod_base = OTHER; note = 2'-O-methyladenosine-3'-phosphate
  modified_base 16: mod_base = OTHER; note = 2'-O-methyladenosine-3'-phosphate
  modified_base 17: mod_base = OTHER; note = 2'-O-methyladenosine-3'-phosphate
  modified_base 18: mod_base = OTHER; note = 2'-O-methylguanosine-3'-phosphate
  modified_base 19: mod_base = OTHER; note = 2'-O-methyluridine-3'-phosphate
  modified_base 20: mod_base = OTHER; note = 2'-O-methylguanosine-3'-phosphate
  modified_base 21: mod_base = OTHER; note = 2'-O-methyladenosine-3'-phosphate ((2S,4R)-1-[29-[[2-(acetylamino)-2-deoxy-beta-D-galactopyra nosyl]oxy]-14,14-bis[[3-[[3-[[5-[[2-(acetylamino)-2-deoxy-b eta-D-galactopyranosyl]oxy]-1-oxopentyl]amino]propyl]amino] -3-oxopropoxy]methyl]-1,12,19,25-tetraoxo-16-oxa-13,20,24-t riazanonacos-1-yl]-4-hydroxy-2-pyrrolidinyl)methyl ester
cacagaaactcaataaagtga

SEQ ID NO: 74 - RNA, 23 nt, synthetic construct
  source 1..23: mol_type = other RNA
  modified_base 1: mod_base = OTHER; note = 2'-O-methyluridine-3'-phosphate 5'-(E)-Vinylphosphonate
  modified_base 2: mod_base = OTHER; note = 2'-deoxy-2'-fluorocytidine-3'-phosphate
  modified_base 3: mod_base = OTHER; note = 2'-O-methyladenosine-3'-phosphate
  modified_base 4: mod_base = OTHER; note = 2'-O-methylcytidine-3'-phosphate
  modified_base 5: mod_base = OTHER; note = 2'-O-methyluridine-3'-phosphate
  modified_base 6: mod_base = OTHER; note = 2'-deoxy-2'-fluorouridine-3'-phosphate
  modified_base 7: mod_base = OTHER; note = 2'-O-methyluridine-3'-phosphate
  modified_base 8: mod_base = OTHER; note = 2'-deoxy-2'-fluoroadenosine-3'-phosphate
  modified_base 9: mod_base = OTHER; note = 2'-deoxy-2'-fluorouridine-3'-phosphate
  modified_base 10: mod_base = OTHER; note = 2'-O-methyluridine-3'-phosphate
  modified_base 11: mod_base = OTHER; note = 2'-O-methylguanosine-3'-phosphate
  modified_base 12: mod_base = OTHER; note = 2'-O-methyladenosine-3'-phosphate
  modified_base 13: mod_base = OTHER; note = 2'-O-methylguanosine-3'-phosphate
  modified_base 14: mod_base = OTHER; note = 2'-deoxy-2'-fluorouridine-3'-phosphate
  modified_base 15: mod_base = OTHER; note = 2'-O-methyluridine-3'-phosphate
  modified_base 16: mod_base = OTHER; note = 2'-deoxy-2'-fluorouridine-3'-phosphate
  modified_base 17: mod_base = OTHER; note = 2'-O-methylcytidine-3'-phosphate
  modified_base 18: mod_base = OTHER; note = 2'-O-methyluridine-3'-phosphate
  modified_base 19: mod_base = OTHER; note = 2'-O-methylguanosine-3'-phosphate
  modified_base 20: mod_base = OTHER; note = 2'-O-methyluridine-3'-phosphate
  modified_base 21: mod_base = OTHER; note = 2'-O-methylguanosine-3'-phosphorothioate
  modified_base 22: mod_base = OTHER; note = 2'-O-methylcytidine-3'-phosphorothioate
  modified_base 23: mod_base = OTHER; note = 2'-O-methylcytidine
tcactttattgagtttctgtgcc

SEQ ID NO: 75 - RNA, 21 nt, synthetic construct
  source 1..21: mol_type = other RNA
  modified_base 1: mod_base = OTHER; note = 2'-O-methylcytidine-3'-phosphorothioate
  modified_base 2: mod_base = OTHER; note = 2'-O-methyladenosine-3'-phosphorothioate
  modified_base 3: mod_base = OTHER; note = 2'-O-methylcytidine-3'-phosphate
  modified_base 4: mod_base = OTHER; note = 2'-O-methyladenosine-3'-phosphate
  modified_base 5: mod_base = OTHER; note = 2'-O-methylguanosine-3'-phosphate
  modified_base 6: mod_base = OTHER; note = 2'-O-methyladenosine-3'-phosphate
  modified_base 7: mod_base = OTHER; note = 2'-deoxy-2'-fluoroadenosine-3'-phosphate
  modified_base 8: mod_base = OTHER; note = 2'-O-methyladenosine-3'-phosphate
  modified_base 9: mod_base = OTHER; note = 2'-deoxy-2'-fluorocytidine-3'-phosphate
  modified_base 10: mod_base = OTHER; note = 2'-deoxy-2'-fluorouridine-3'-phosphate
  modified_base 11: mod_base = OTHER; note = 2'-deoxy-2'-fluorocytidine-3'-phosphate
  modified_base 12: mod_base = OTHER; note = 2'-O-methyladenosine-3'-phosphate
  modified_base 13: mod_base = OTHER; note = 2'-O-methyladenosine-3'-phosphate
  modified_base 14: mod_base = OTHER; note = 2'-O-methyluridine-3'-phosphate
  modified_base 15: mod_base = OTHER; note = 2'-O-methyladenosine-3'-phosphate
  modified_base 16: mod_base = OTHER; note = 2'-O-methyladenosine-3'-phosphate
  modified_base 17: mod_base = OTHER; note = 2'-O-methyladenosine-3'-phosphate
  modified_base 18: mod_base = OTHER; note = 2'-O-methylguanosine-3'-phosphate
  modified_base 19: mod_base = OTHER; note = 2'-O-methyluridine-3'-phosphate
  modified_base 20: mod_base = OTHER; note = 2'-O-methylguanosine-3'-phosphate
  modified_base 21: mod_base = OTHER; note = 2'-O-methyladenosine-3'-phosphate ((2S,4R)-1-[29-[[2-(acetylamino)-2-deoxy-beta-D-galactopyra nosyl]oxy]-14,14-bis[[3-[[3-[[5-[[2-(acetylamino)-2-deoxy-b eta-D-galactopyranosyl]oxy]-1-oxopentyl]amino]propyl]amino] -3-oxopropoxy]methyl]-1,12,19,25-tetraoxo-16-oxa-13,20,24-t riazanonacos-1-yl]-4-hydroxy-2-pyrrolidinyl)methyl ester
cacagaaactcaataaagtga

SEQ ID NO: 76 - RNA, 23 nt, synthetic construct
  source 1..23: mol_type = other RNA
  modified_base 1: mod_base = OTHER; note = 2'-O-methyluridine-3'-phosphate
  modified_base 2: mod_base = OTHER; note = 2'-deoxy-2'-fluorocytidine-3'-phosphate
  modified_base 3: mod_base = OTHER; note = 2'-O-methyladenosine-3'-phosphate
  modified_base 4: mod_base = OTHER; note = 2'-O-methylcytidine-3'-phosphate
  modified_base 5: mod_base = OTHER; note = 2'-O-methyluridine-3'-phosphate
  modified_base 6: mod_base = OTHER; note = 2'-deoxy-2'-fluorouridine-3'-phosphate
  modified_base 7: mod_base = OTHER; note = 2'-O-methyluridine-3'-phosphate
  modified_base 8: mod_base = OTHER; note = 2'-deoxy-2'-fluoroadenosine-3'-phosphate
  modified_base 9: mod_base = OTHER; note = 2'-deoxy-2'-fluorouridine-3'-phosphate
  modified_base 10: mod_base = OTHER; note = 2'-O-methyluridine-3'-phosphate
  modified_base 11: mod_base = OTHER; note = 2'-O-methylguanosine-3'-phosphate
  modified_base 12: mod_base = OTHER; note = 2'-O-methyladenosine-3'-phosphate
  modified_base 13: mod_base = OTHER; note = 2'-O-methylguanosine-3'-phosphate
  modified_base 14: mod_base = OTHER; note = 2'-deoxy-2'-fluorouridine-3'-phosphate
  modified_base 15: mod_base = OTHER; note = 2'-O-methyluridine-3'-phosphate
  modified_base 16: mod_base = OTHER; note = 2'-deoxy-2'-fluorouridine-3'-phosphate
  modified_base 17: mod_base = OTHER; note = 2'-O-methylcytidine-3'-phosphate
  modified_base 18: mod_base = OTHER; note = 2'-O-methyluridine-3'-phosphate
  modified_base 19: mod_base = OTHER; note = 2'-O-methylguanosine-3'-phosphate
  modified_base 20: mod_base = OTHER; note = 2'-O-methyluridine-3'-phosphate
  modified_base 21: mod_base = OTHER; note = 2'-O-methylguanosine-3'-phosphorothioate
  modified_base 22: mod_base = OTHER; note = 2'-O-methylcytidine-3'-phosphorothioate
  modified_base 23: mod_base = OTHER; note = 2'-O-methylcytidine
tcactttattgagtttctgtgcc

SEQ ID NO: 77 - RNA, 21 nt, synthetic construct
  source 1..21: mol_type = other RNA
  modified_base 1: mod_base = OTHER; note = 2'-O-methylcytidine-3'-phosphorothioate
  modified_base 2: mod_base = OTHER; note = 2'-O-methyladenosine-3'-phosphorothioate
  modified_base 3: mod_base = OTHER; note = 2'-O-methylcytidine-3'-phosphate
  modified_base 4: mod_base = OTHER; note = 2'-O-methyladenosine-3'-phosphate
  modified_base 5: mod_base = OTHER; note = 2'-O-methylguanosine-3'-phosphate
  modified_base 6: mod_base = OTHER; note = 2'-O-methyladenosine-3'-phosphate
  modified_base 7: mod_base = OTHER; note = 2'-deoxy-2'-fluoroadenosine-3'-phosphate
  modified_base 8: mod_base = OTHER; note = 2'-O-methyladenosine-3'-phosphate
  modified_base 9: mod_base = OTHER; note = 2'-deoxy-2'-fluorocytidine-3'-phosphate
  modified_base 10: mod_base = OTHER; note = 2'-deoxy-2'-fluorouridine-3'-phosphate
  modified_base 11: mod_base = OTHER; note = 2'-deoxy-2'-fluorocytidine-3'-phosphate
  modified_base 12: mod_base = OTHER; note = 2'-O-methyladenosine-3'-phosphate
  modified_base 13: mod_base = OTHER; note = 2'-O-methyladenosine-3'-phosphate
  modified_base 14: mod_base = OTHER; note = 2'-O-methyluridine-3'-phosphate
  modified_base 15: mod_base = OTHER; note = 2'-O-methyladenosine-3'-phosphate
  modified_base 16: mod_base = OTHER; note = 2'-O-methyladenosine-3'-phosphate
  modified_base 17: mod_base = OTHER; note = 2'-O-methyladenosine-3'-phosphate
  modified_base 18: mod_base = OTHER; note = 2'-O-methylguanosine-3'-phosphate
  modified_base 19: mod_base = OTHER; note = 2'-O-methyluridine-3'-phosphate
  modified_base 20: mod_base = OTHER; note = 2'-O-methylguanosine-3'-phosphate
  modified_base 21: mod_base = OTHER; note = 2'-O-methyladenosine-3'-phosphate ((2S,4R)-1-[29-[[2-(acetylamino)-2-deoxy-beta-D-galactopyra nosyl]oxy]-14,14-bis[[3-[[3-[[5-[[2-(acetylamino)-2-deoxy-b eta-D-galactopyranosyl]oxy]-1-oxopentyl]amino]propyl]amino] -3-oxopropoxy]methyl]-1,12,19,25-tetraoxo-16-oxa-13,20,24-t riazanonacos-1-yl]-4-hydroxy-2-pyrrolidinyl)methyl ester
cacagaaactcaataaagtga

SEQ ID NO: 78 - RNA, 23 nt, synthetic construct
  source 1..23: mol_type = other RNA
  modified_base 1: mod_base = OTHER; note = 2'-O-methyluridine-3'-phosphorothioate 5'-(trans-5-methoxy-1,2-dithian-4-yl phosphate)
  modified_base 2: mod_base = OTHER; note = 2'-deoxy-2'-fluorocytidine-3'-phosphorothioate
  modified_base 3: mod_base = OTHER; note = 2'-O-methyladenosine-3'-phosphate
  modified_base 4: mod_base = OTHER; note = 2'-O-methylcytidine-3'-phosphate
  modified_base 5: mod_base = OTHER; note = 2'-O-methyluridine-3'-phosphate
  modified_base 6: mod_base = OTHER; note = 2'-deoxy-2'-fluorouridine-3'-phosphate
  modified_base 7: mod_base = OTHER; note = 2'-O-methyluridine-3'-phosphate
  modified_base 8: mod_base = OTHER; note = 2'-deoxy-2'-fluoroadenosine-3'-phosphate
  modified_base 9: mod_base = OTHER; note = 2'-deoxy-2'-fluorouridine-3'-phosphate
  modified_base 10: mod_base = OTHER; note = 2'-O-methyluridine-3'-phosphate
  modified_base 11: mod_base = OTHER; note = 2'-O-methylguanosine-3'-phosphate
  modified_base 12: mod_base = OTHER; note = 2'-O-methyladenosine-3'-phosphate
  modified_base 13: mod_base = OTHER; note = 2'-O-methylguanosine-3'-phosphate
  modified_base 14: mod_base = OTHER; note = 2'-deoxy-2'-fluorouridine-3'-phosphate
  modified_base 15: mod_base = OTHER; note = 2'-O-methyluridine-3'-phosphate
  modified_base 16: mod_base = OTHER; note = 2'-deoxy-2'-fluorouridine-3'-phosphate
  modified_base 17: mod_base = OTHER; note = 2'-O-methylcytidine-3'-phosphate
  modified_base 18: mod_base = OTHER; note = 2'-O-methyluridine-3'-phosphate
  modified_base 19: mod_base = OTHER; note = 2'-O-methylguanosine-3'-phosphate
  modified_base 20: mod_base = OTHER; note = 2'-O-methyluridine-3'-phosphate
  modified_base 21: mod_base = OTHER; note = 2'-O-methylguanosine-3'-phosphorothioate
  modified_base 22: mod_base = OTHER; note = 2'-O-methylcytidine-3'-phosphorothioate
  modified_base 23: mod_base = OTHER; note = 2'-O-methylcytidine
tcactttattgagtttctgtgcc

SEQ ID NO: 79 - RNA, 21 nt, synthetic construct
  source 1..21: mol_type = other RNA
  modified_base 1: mod_base = OTHER; note = 2'-O-methylcytidine-3'-phosphorothioate
  modified_base 2: mod_base = OTHER; note = 2'-O-methyladenosine-3'-phosphorothioate
  modified_base 3: mod_base = OTHER; note = 2'-O-methylcytidine-3'-phosphate
  modified_base 4: mod_base = OTHER; note = 2'-O-methyladenosine-3'-phosphate
  modified_base 5: mod_base = OTHER; note = 2'-O-methylguanosine-3'-phosphate
  modified_base 6: mod_base = OTHER; note = 2'-O-methyladenosine-3'-phosphate
  modified_base 7: mod_base = OTHER; note = 2'-deoxy-2'-fluoroadenosine-3'-phosphate
  modified_base 8: mod_base = OTHER; note = 2'-O-methyladenosine-3'-phosphate
  modified_base 9: mod_base = OTHER; note = 2'-deoxy-2'-fluorocytidine-3'-phosphate
  modified_base 10: mod_base = OTHER; note = 2'-deoxy-2'-fluorouridine-3'-phosphate
  modified_base 11: mod_base = OTHER; note = 2'-deoxy-2'-fluorocytidine-3'-phosphate
  modified_base 12: mod_base = OTHER; note = 2'-O-methyladenosine-3'-phosphate
  modified_base 13: mod_base = OTHER; note = 2'-O-methyladenosine-3'-phosphate
  modified_base 14: mod_base = OTHER; note = 2'-O-methyluridine-3'-phosphate
  modified_base 15: mod_base = OTHER; note = 2'-O-methyladenosine-3'-phosphate
  modified_base 16: mod_base = OTHER; note = 2'-O-methyladenosine-3'-phosphate
  modified_base 17: mod_base = OTHER; note = 2'-O-methyladenosine-3'-phosphate
  modified_base 18: mod_base = OTHER; note = 2'-O-methylguanosine-3'-phosphate
  modified_base 19: mod_base = OTHER; note = 2'-O-methyluridine-3'-phosphate
  modified_base 20: mod_base = OTHER; note = 2'-O-methylguanosine-3'-phosphate
  modified_base 21: mod_base = OTHER; note = 2'-O-methyladenosine-3'-phosphate ((2S,4R)-1-[29-[[2-(acetylamino)-2-deoxy-beta-D-galactopyra nosyl]oxy]-14,14-bis[[3-[[3-[[5-[[2-(acetylamino)-2-deoxy-b eta-D-galactopyranosyl]oxy]-1-oxopentyl]amino]propyl]amino] -3-oxopropoxy]methyl]-1,12,19,25-tetraoxo-16-oxa-13,20,24-t riazanonacos-1-yl]-4-hydroxy-2-pyrrolidinyl)methyl ester
cacagaaactcaataaagtga

SEQ ID NO: 80 - RNA, 23 nt, synthetic construct
  source 1..23: mol_type = other RNA
  modified_base 1: mod_base = OTHER; note = 2'-O-methyluridine-3'-phosphate 5'-(trans-5-methoxy-1,2-dithian-4-yl phosphate)
  modified_base 2: mod_base = OTHER; note = 2'-deoxy-2'-fluorocytidine-3'-phosphate
  modified_base 3: mod_base = OTHER; note = 2'-O-methyladenosine-3'-phosphate
  modified_base 4: mod_base = OTHER; note = 2'-O-methylcytidine-3'-phosphate
  modified_base 5: mod_base = OTHER; note = 2'-O-methyluridine-3'-phosphate
  modified_base 6: mod_base = OTHER; note = 2'-deoxy-2'-fluorouridine-3'-phosphate
  modified_base 7: mod_base = OTHER; note = 2'-O-methyluridine-3'-phosphate
  modified_base 8: mod_base = OTHER; note = 2'-deoxy-2'-fluoroadenosine-3'-phosphate
  modified_base 9: mod_base = OTHER; note = 2'-deoxy-2'-fluorouridine-3'-phosphate
  modified_base 10: mod_base = OTHER; note = 2'-O-methyluridine-3'-phosphate
  modified_base 11: mod_base = OTHER; note = 2'-O-methylguanosine-3'-phosphate
  modified_base 12: mod_base = OTHER; note = 2'-O-methyladenosine-3'-phosphate
  modified_base 13: mod_base = OTHER; note = 2'-O-methylguanosine-3'-phosphate
  modified_base 14: mod_base = OTHER; note = 2'-deoxy-2'-fluorouridine-3'-phosphate
  modified_base 15: mod_base = OTHER; note = 2'-O-methyluridine-3'-phosphate
  modified_base 16: mod_base = OTHER; note = 2'-deoxy-2'-fluorouridine-3'-phosphate
  modified_base 17: mod_base = OTHER; note = 2'-O-methylcytidine-3'-phosphate
  modified_base 18: mod_base = OTHER; note = 2'-O-methyluridine-3'-phosphate
  modified_base 19: mod_base = OTHER; note = 2'-O-methylguanosine-3'-phosphate
  modified_base 20: mod_base = OTHER; note = 2'-O-methyluridine-3'-phosphate
  modified_base 21: mod_base = OTHER; note = 2'-O-methylguanosine-3'-phosphorothioate
  modified_base 22: mod_base = OTHER; note = 2'-O-methylcytidine-3'-phosphorothioate
  modified_base 23: mod_base = OTHER; note = 2'-O-methylcytidine
tcactttattgagtttctgtgcc

SEQ ID NO: 81 - RNA, 21 nt, synthetic construct
  source 1..21: mol_type = other RNA
  modified_base 1: mod_base = OTHER; note = 2'-O-methylcytidine-3'-phosphorothioate
  modified_base 2: mod_base = OTHER; note = 2'-O-methyladenosine-3'-phosphorothioate
  modified_base 3: mod_base = OTHER; note = 2'-O-methylcytidine-3'-phosphate
  modified_base 4: mod_base = OTHER; note = 2'-O-methyladenosine-3'-phosphate
  modified_base 5: mod_base = OTHER; note = 2'-O-methylguanosine-3'-phosphate
  modified_base 6: mod_base = OTHER; note = 2'-O-methyladenosine-3'-phosphate
  modified_base 7: mod_base = OTHER; note = 2'-deoxy-2'-fluoroadenosine-3'-phosphate
  modified_base 8: mod_base = OTHER; note = 2'-O-methyladenosine-3'-phosphate
  modified_base 9: mod_base = OTHER; note = 2'-deoxy-2'-fluorocytidine-3'-phosphate
  modified_base 10: mod_base = OTHER; note = 2'-deoxy-2'-fluorouridine-3'-phosphate
  modified_base 11: mod_base = OTHER; note = 2'-deoxy-2'-fluorocytidine-3'-phosphate
  modified_base 12: mod_base = OTHER; note = 2'-O-methyladenosine-3'-phosphate
  modified_base 13: mod_base = OTHER; note = 2'-O-methyladenosine-3'-phosphate
  modified_base 14: mod_base = OTHER; note = 2'-O-methyluridine-3'-phosphate
  modified_base 15: mod_base = OTHER; note = 2'-O-methyladenosine-3'-phosphate
  modified_base 16: mod_base = OTHER; note = 2'-O-methyladenosine-3'-phosphate
  modified_base 17: mod_base = OTHER; note = 2'-O-methyladenosine-3'-phosphate
  modified_base 18: mod_base = OTHER; note = 2'-O-methylguanosine-3'-phosphate
  modified_base 19: mod_base = OTHER; note = 2'-O-methyluridine-3'-phosphate
  modified_base 20: mod_base = OTHER; note = 2'-O-methylguanosine-3'-phosphate
  modified_base 21: mod_base = OTHER; note = 2'-O-methyladenosine-3'-phosphate ((2S,4R)-1-[29-[[2-(acetylamino)-2-deoxy-beta-D-galactopyra nosyl]oxy]-14,14-bis[[3-[[3-[[5-[[2-(acetylamino)-2-deoxy-b eta-D-galactopyranosyl]oxy]-1-oxopentyl]amino]propyl]amino] -3-oxopropoxy]methyl]-1,12,19,25-tetraoxo-16-oxa-13,20,24-t riazanonacos-1-yl]-4-hydroxy-2-pyrrolidinyl)methyl ester
cacagaaactcaataaagtga

SEQ ID NO: 82 - RNA, 23 nt, synthetic construct
  source 1..23: mol_type = other RNA
  modified_base 1: mod_base = OTHER; note = 2'-O-methyluridine-3'-phosphorothioate 5'-(trans-5-methoxy-1,2-dithian-4-yl thiophosphate)
  modified_base 2: mod_base = OTHER; note = 2'-deoxy-2'-fluorocytidine-3'-phosphorothioate
  modified_base 3: mod_base = OTHER; note = 2'-O-methyladenosine-3'-phosphate
  modified_base 4: mod_base = OTHER; note = 2'-O-methylcytidine-3'-phosphate
  modified_base 5: mod_base = OTHER; note = 2'-O-methyluridine-3'-phosphate
  modified_base 6: mod_base = OTHER; note = 2'-deoxy-2'-fluorouridine-3'-phosphate
  modified_base 7: mod_base = OTHER; note = 2'-O-methyluridine-3'-phosphate
  modified_base 8: mod_base = OTHER; note = 2'-deoxy-2'-fluoroadenosine-3'-phosphate
  modified_base 9: mod_base = OTHER; note = 2'-deoxy-2'-fluorouridine-3'-phosphate
  modified_base 10: mod_base = OTHER; note = 2'-O-methyluridine-3'-phosphate
  modified_base 11: mod_base = OTHER; note = 2'-O-methylguanosine-3'-phosphate
  modified_base 12: mod_base = OTHER; note = 2'-O-methyladenosine-3'-phosphate
  modified_base 13: mod_base = OTHER; note = 2'-O-methylguanosine-3'-phosphate
  modified_base 14: mod_base = OTHER; note = 2'-deoxy-2'-fluorouridine-3'-phosphate
  modified_base 15: mod_base = OTHER; note = 2'-O-methyluridine-3'-phosphate
  modified_base 16: mod_base = OTHER; note = 2'-deoxy-2'-fluorouridine-3'-phosphate
  modified_base 17: mod_base = OTHER; note = 2'-O-methylcytidine-3'-phosphate
  modified_base 18: mod_base = OTHER; note = 2'-O-methyluridine-3'-phosphate
  modified_base 19: mod_base = OTHER; note = 2'-O-methylguanosine-3'-phosphate
  modified_base 20: mod_base = OTHER; note = 2'-O-methyluridine-3'-phosphate
  modified_base 21: mod_base = OTHER; note = 2'-O-methylguanosine-3'-phosphorothioate
  modified_base 22: mod_base = OTHER; note = 2'-O-methylcytidine-3'-phosphorothioate
  modified_base 23: mod_base = OTHER; note = 2'-O-methylcytidine
tcactttattgagtttctgtgcc

SEQ ID NO: 83 - RNA, 21 nt, synthetic construct
  source 1..21: mol_type = other RNA
  modified_base 1: mod_base = OTHER; note = 2'-O-methylcytidine-3'-phosphorothioate
  modified_base 2: mod_base = OTHER; note = 2'-O-methyladenosine-3'-phosphorothioate
  modified_base 3: mod_base = OTHER; note = 2'-O-methylcytidine-3'-phosphate
  modified_base 4: mod_base = OTHER; note = 2'-O-methyladenosine-3'-phosphate
  modified_base 5: mod_base = OTHER; note = 2'-O-methylguanosine-3'-phosphate
  modified_base 6: mod_base = OTHER; note = 2'-O-methyladenosine-3'-phosphate
  modified_base 7: mod_base = OTHER; note = 2'-deoxy-2'-fluoroadenosine-3'-phosphate
  modified_base 8: mod_base = OTHER; note = 2'-O-methyladenosine-3'-phosphate
  modified_base 9: mod_base = OTHER; note = 2'-deoxy-2'-fluorocytidine-3'-phosphate
  modified_base 10: mod_base = OTHER; note = 2'-deoxy-2'-fluorouridine-3'-phosphate
  modified_base 11: mod_base = OTHER; note = 2'-deoxy-2'-fluorocytidine-3'-phosphate
  modified_base 12: mod_base = OTHER; note = 2'-O-methyladenosine-3'-phosphate
  modified_base 13: mod_base = OTHER; note = 2'-O-methyladenosine-3'-phosphate
  modified_base 14: mod_base = OTHER; note = 2'-O-methyluridine-3'-phosphate
  modified_base 15: mod_base = OTHER; note = 2'-O-methyladenosine-3'-phosphate
  modified_base 16: mod_base = OTHER; note = 2'-O-methyladenosine-3'-phosphate
  modified_base 17: mod_base = OTHER; note = 2'-O-methyladenosine-3'-phosphate
  modified_base 18: mod_base = OTHER; note = 2'-O-methylguanosine-3'-phosphate
  modified_base 19: mod_base = OTHER; note = 2'-O-methyluridine-3'-phosphate
  modified_base 20: mod_base = OTHER; note = 2'-O-methylguanosine-3'-phosphate
  modified_base 21: mod_base = OTHER; note = 2'-O-methyladenosine-3'-phosphate ((2S,4R)-1-[29-[[2-(acetylamino)-2-deoxy-beta-D-galactopyra nosyl]oxy]-14,14-bis[[3-[[3-[[5-[[2-(acetylamino)-2-deoxy-b eta-D-galactopyranosyl]oxy]-1-oxopentyl]amino]propyl]amino] -3-oxopropoxy]methyl]-1,12,19,25-tetraoxo-16-oxa-13,20,24-t riazanonacos-1-yl]-4-hydroxy-2-pyrrolidinyl)methyl ester
cacagaaactcaataaagtga

SEQ ID NO: 84 - RNA, 23 nt, synthetic construct
  source 1..23: mol_type = other RNA
  modified_base 1: mod_base = OTHER; note = 2'-O-methyluridine-3'-phosphate 5'-(trans-5-methoxy-1,2-dithian-4-yl thiophosphate)
  modified_base 2: mod_base = OTHER; note = 2'-deoxy-2'-fluorocytidine-3'-phosphate
  modified_base 3: mod_base = OTHER; note = 2'-O-methyladenosine-3'-phosphate
  modified_base 4: mod_base = OTHER; note = 2'-O-methylcytidine-3'-phosphate
  modified_base 5: mod_base = OTHER; note = 2'-O-methyluridine-3'-phosphate
  modified_base 6: mod_base = OTHER; note = 2'-deoxy-2'-fluorouridine-3'-phosphate
  modified_base 7: mod_base = OTHER; note = 2'-O-methyluridine-3'-phosphate
  modified_base 8: mod_base = OTHER; note = 2'-deoxy-2'-fluoroadenosine-3'-phosphate
  modified_base 9: mod_base = OTHER; note = 2'-deoxy-2'-fluorouridine-3'-phosphate
  modified_base 10: mod_base = OTHER; note = 2'-O-methyluridine-3'-phosphate
  modified_base 11: mod_base = OTHER; note = 2'-O-methylguanosine-3'-phosphate
  modified_base 12: mod_base = OTHER; note = 2'-O-methyladenosine-3'-phosphate
  modified_base 13: mod_base = OTHER; note = 2'-O-methylguanosine-3'-phosphate
  modified_base 14: mod_base = OTHER; note = 2'-deoxy-2'-fluorouridine-3'-phosphate
  modified_base 15: mod_base = OTHER; note = 2'-O-methyluridine-3'-phosphate
  modified_base 16: mod_base = OTHER; note = 2'-deoxy-2'-fluorouridine-3'-phosphate
  modified_base 17: mod_base = OTHER; note = 2'-O-methylcytidine-3'-phosphate
  modified_base 18: mod_base = OTHER; note = 2'-O-methyluridine-3'-phosphate
  modified_base 19: mod_base = OTHER; note = 2'-O-methylguanosine-3'-phosphate
  modified_base 20: mod_base = OTHER; note = 2'-O-methyluridine-3'-phosphate
  modified_base 21: mod_base = OTHER; note = 2'-O-methylguanosine-3'-phosphorothioate
  modified_base 22: mod_base = OTHER; note = 2'-O-methylcytidine-3'-phosphorothioate
  modified_base 23: mod_base = OTHER; note = 2'-O-methylcytidine
tcactttattgagtttctgtgcc

SEQ ID NO: 85 - RNA, 21 nt, synthetic construct
  source 1..21: mol_type = other RNA
  modified_base 1: mod_base = OTHER; note = 2'-O-methylcytidine-3'-phosphorothioate
  modified_base 2: mod_base = OTHER; note = 2'-O-methyladenosine-3'-phosphorothioate
  modified_base 3: mod_base = OTHER; note = 2'-O-methylcytidine-3'-phosphate
  modified_base 4: mod_base = OTHER; note = 2'-O-methyladenosine-3'-phosphate
  modified_base 5: mod_base = OTHER; note = 2'-O-methylguanosine-3'-phosphate
  modified_base 6: mod_base = OTHER; note = 2'-O-methyladenosine-3'-phosphate
  modified_base 7: mod_base = OTHER; note = 2'-deoxy-2'-fluoroadenosine-3'-phosphate
  modified_base 8: mod_base = OTHER; note = 2'-O-methyladenosine-3'-phosphate
  modified_base 9: mod_base = OTHER; note = 2'-deoxy-2'-fluorocytidine-3'-phosphate
  modified_base 10: mod_base = OTHER; note = 2'-deoxy-2'-fluorouridine-3'-phosphate
  modified_base 11: mod_base = OTHER; note = 2'-deoxy-2'-fluorocytidine-3'-phosphate
  modified_base 12: mod_base = OTHER; note = 2'-O-methyladenosine-3'-phosphate
  modified_base 13: mod_base = OTHER; note = 2'-O-methyladenosine-3'-phosphate
  modified_base 14: mod_base = OTHER; note = 2'-O-methyluridine-3'-phosphate
  modified_base 15: mod_base = OTHER; note = 2'-O-methyladenosine-3'-phosphate
  modified_base 16: mod_base = OTHER; note = 2'-O-methyladenosine-3'-phosphate
  modified_base 17: mod_base = OTHER; note = 2'-O-methyladenosine-3'-phosphate
  modified_base 18: mod_base = OTHER; note = 2'-O-methylguanosine-3'-phosphate
  modified_base 19: mod_base = OTHER; note = 2'-O-methyluridine-3'-phosphate
  modified_base 20: mod_base = OTHER; note = 2'-O-methylguanosine-3'-phosphate
  modified_base 21: mod_base = OTHER; note = 2'-O-methyladenosine-3'-phosphate ((2S,4R)-1-[29-[[2-(acetylamino)-2-deoxy-beta-D-galactopyra nosyl]oxy]-14,14-bis[[3-[[3-[[5-[[2-(acetylamino)-2-deoxy-b eta-D-galactopyranosyl]oxy]-1-oxopentyl]amino]propyl]amino] -3-oxopropoxy]methyl]-1,12,19,25-tetraoxo-16-oxa-13,20,24-t riazanonacos-1-yl]-4-hydroxy-2-pyrrolidinyl)methyl ester
cacagaaactcaataaagtga

SEQ ID NO: 86 - RNA, 23 nt, synthetic construct
  source 1..23: mol_type = other RNA
  modified_base 1: mod_base = OTHER; note = 2'-O-methyluridine-3'-phosphorothioate 5'-thiophosphate
  modified_base 2: mod_base = OTHER; note = 2'-deoxy-2'-fluorocytidine-3'-phosphorothioate
  modified_base 3: mod_base = OTHER; note = 2'-O-methyladenosine-3'-phosphate
  modified_base 4: mod_base = OTHER; note = 2'-O-methylcytidine-3'-phosphate
  modified_base 5: mod_base = OTHER; note = 2'-O-methyluridine-3'-phosphate
  modified_base 6: mod_base = OTHER; note = 2'-deoxy-2'-fluorouridine-3'-phosphate
  modified_base 7: mod_base = OTHER; note = 2'-O-methyluridine-3'-phosphate
  modified_base 8: mod_base = OTHER; note = 2'-deoxy-2'-fluoroadenosine-3'-phosphate
  modified_base 9: mod_base = OTHER; note = 2'-deoxy-2'-fluorouridine-3'-phosphate
  modified_base 10: mod_base = OTHER; note = 2'-O-methyluridine-3'-phosphate
  modified_base 11: mod_base = OTHER; note = 2'-O-methylguanosine-3'-phosphate
  modified_base 12: mod_base = OTHER; note = 2'-O-methyladenosine-3'-phosphate
  modified_base 13: mod_base = OTHER; note = 2'-O-methylguanosine-3'-phosphate
  modified_base 14: mod_base = OTHER; note = 2'-deoxy-2'-fluorouridine-3'-phosphate
  modified_base 15: mod_base = OTHER; note = 2'-O-methyluridine-3'-phosphate
  modified_base 16: mod_base = OTHER; note = 2'-deoxy-2'-fluorouridine-3'-phosphate
  modified_base 17: mod_base = OTHER; note = 2'-O-methylcytidine-3'-phosphate
  modified_base 18: mod_base = OTHER; note = 2'-O-methyluridine-3'-phosphate
  modified_base 19: mod_base = OTHER; note = 2'-O-methylguanosine-3'-phosphate
  modified_base 20: mod_base = OTHER; note = 2'-O-methyluridine-3'-phosphate
  modified_base 21: mod_base = OTHER; note = 2'-O-methylguanosine-3'-phosphorothioate
  modified_base 22: mod_base = OTHER; note = 2'-O-methylcytidine-3'-phosphorothioate
  modified_base 23: mod_base = OTHER; note = 2'-O-methylcytidine
tcactttattgagtttctgtgcc

SEQ ID NO: 87 - RNA, 21 nt, synthetic construct
  source 1..21: mol_type = other RNA
  modified_base 1: mod_base = OTHER; note = 2'-O-methylcytidine-3'-phosphorothioate
  modified_base 2: mod_base = OTHER; note = 2'-O-methyladenosine-3'-phosphorothioate
  modified_base 3: mod_base = OTHER; note = 2'-O-methylcytidine-3'-phosphate
  modified_base 4: mod_base = OTHER; note = 2'-O-methyladenosine-3'-phosphate
  modified_base 5: mod_base = OTHER; note = 2'-O-methylguanosine-3'-phosphate
  modified_base 6: mod_base = OTHER; note = 2'-O-methyladenosine-3'-phosphate
  modified_base 7: mod_base = OTHER; note = 2'-deoxy-2'-fluoroadenosine-3'-phosphate
  modified_base 8: mod_base = OTHER; note = 2'-O-methyladenosine-3'-phosphate
  modified_base 9: mod_base = OTHER; note = 2'-deoxy-2'-fluorocytidine-3'-phosphate
  modified_base 10: mod_base = OTHER; note = 2'-deoxy-2'-fluorouridine-3'-phosphate
  modified_base 11: mod_base = OTHER; note = 2'-deoxy-2'-fluorocytidine-3'-phosphate
  modified_base 12: mod_base = OTHER; note = 2'-O-methyladenosine-3'-phosphate
  modified_base 13: mod_base = OTHER; note = 2'-O-methyladenosine-3'-phosphate
  modified_base 14: mod_base = OTHER; note = 2'-O-methyluridine-3'-phosphate
  modified_base 15: mod_base = OTHER; note = 2'-O-methyladenosine-3'-phosphate
  modified_base 16: mod_base = OTHER; note = 2'-O-methyladenosine-3'-phosphate
  modified_base 17: mod_base = OTHER; note = 2'-O-methyladenosine-3'-phosphate
  modified_base 18: mod_base = OTHER; note = 2'-O-methylguanosine-3'-phosphate
  modified_base 19: mod_base = OTHER; note = 2'-O-methyluridine-3'-phosphate
  modified_base 20: mod_base = OTHER; note = 2'-O-methylguanosine-3'-phosphate
  modified_base 21: mod_base = OTHER; note = 2'-O-methyladenosine-3'-phosphate ((2S,4R)-1-[29-[[2-(acetylamino)-2-deoxy-beta-D-galactopyra nosyl]oxy]-14,14-bis[[3-[[3-[[5-[[2-(acetylamino)-2-deoxy-b eta-D-galactopyranosyl]oxy]-1-oxopentyl]amino]propyl]amino] -3-oxopropoxy]methyl]-1,12,19,25-tetraoxo-16-oxa-13,20,24-t riazanonacos-1-yl]-4-hydroxy-2-pyrrolidinyl)methyl ester
cacagaaactcaataaagtga

SEQ ID NO: 88 - RNA, 23 nt, synthetic construct
  source 1..23: mol_type = other RNA
  modified_base 1: mod_base = OTHER; note = 2'-O-methyluridine-3'-phosphate 5'-thiophosphate
  modified_base 2: mod_base = OTHER; note = 2'-deoxy-2'-fluorocytidine-3'-phosphate
  modified_base 3: mod_base = OTHER; note = 2'-O-methyladenosine-3'-phosphate
  modified_base 4: mod_base = OTHER; note = 2'-O-methylcytidine-3'-phosphate
  modified_base 5: mod_base = OTHER; note = 2'-O-methyluridine-3'-phosphate
  modified_base 6: mod_base = OTHER; note = 2'-deoxy-2'-fluorouridine-3'-phosphate
  modified_base 7: mod_base = OTHER; note = 2'-O-methyluridine-3'-phosphate
  modified_base 8: mod_base = OTHER; note = 2'-deoxy-2'-fluoroadenosine-3'-phosphate
  modified_base 9: mod_base = OTHER; note = 2'-deoxy-2'-fluorouridine-3'-phosphate
  modified_base 10: mod_base = OTHER; note = 2'-O-methyluridine-3'-phosphate
  modified_base 11: mod_base = OTHER; note = 2'-O-methylguanosine-3'-phosphate
  modified_base 12: mod_base = OTHER; note = 2'-O-methyladenosine-3'-phosphate
  modified_base 13: mod_base = OTHER; note = 2'-O-methylguanosine-3'-phosphate
  modified_base 14: mod_base = OTHER; note = 2'-deoxy-2'-fluorouridine-3'-phosphate
  modified_base 15: mod_base = OTHER; note = 2'-O-methyluridine-3'-phosphate
  modified_base 16: mod_base = OTHER; note = 2'-deoxy-2'-fluorouridine-3'-phosphate
  modified_base 17: mod_base = OTHER; note = 2'-O-methylcytidine-3'-phosphate
  modified_base 18: mod_base = OTHER; note = 2'-O-methyluridine-3'-phosphate
  modified_base 19: mod_base = OTHER; note = 2'-O-methylguanosine-3'-phosphate
  modified_base 20: mod_base = OTHER; note = 2'-O-methyluridine-3'-phosphate
  modified_base 21: mod_base = OTHER; note = 2'-O-methylguanosine-3'-phosphorothioate
  modified_base 22: mod_base = OTHER; note = 2'-O-methylcytidine-3'-phosphorothioate
  modified_base 23: mod_base = OTHER; note = 2'-O-methylcytidine
tcactttattgagtttctgtgcc

SEQ ID NO: 89 - RNA, 23 nt, synthetic construct
  source 1..23: mol_type = other RNA
  modified_base 1: mod_base = OTHER; note = 2'-O-methyluridine-3'-phosphate 5'-(trans-5-methoxy-1,2-dithian-4-yl phosphate)
  modified_base 2: mod_base = OTHER; note = 2'-deoxy-2'-fluorocytidine-3'-phosphate
  modified_base 3: mod_base = OTHER; note = 2'-O-methyladenosine-3'-phosphate
  modified_base 4: mod_base = OTHER; note = 2'-O-methylcytidine-3'-phosphate
  modified_base 5: mod_base = OTHER; note = 2'-O-methyluridine-3'-phosphate
  modified_base 6: mod_base = OTHER; note = 2'-deoxy-2'-fluorouridine-3'-phosphate
  modified_base 7: mod_base = OTHER; note = 2'-O-methyluridine-3'-phosphate
  modified_base 8: mod_base = OTHER; note = 2'-deoxy-2'-fluoroadenosine-3'-phosphate
  modified_base 9: mod_base = OTHER; note = 2'-deoxy-2'-fluorouridine-3'-phosphate
  modified_base 10: mod_base = OTHER; note = 2'-O-methyluridine-3'-phosphate
  modified_base 11: mod_base = OTHER; note = 2'-O-methylguanosine-3'-phosphate
  modified_base 12: mod_base = OTHER; note = 2'-O-methyladenosine-3'-phosphate
  modified_base 13: mod_base = OTHER; note = 2'-O-methylguanosine-3'-phosphate
  modified_base 14: mod_base = OTHER; note = 2'-deoxy-2'-fluorouridine-3'-phosphate
  modified_base 15: mod_base = OTHER; note = 2'-O-methyluridine-3'-phosphate
  modified_base 16: mod_base = OTHER; note = 2'-deoxy-2'-fluorouridine-3'-phosphate
  modified_base 17: mod_base = OTHER; note = 2'-O-methylcytidine-3'-phosphate
  modified_base 18: mod_base = OTHER; note = 2'-O-methyluridine-3'-phosphate
  modified_base 19: mod_base = OTHER; note = 2'-O-methylguanosine-3'-phosphate
  modified_base 20: mod_base = OTHER; note = 2'-O-methyluridine-3'-phosphate
  modified_base 21: mod_base = OTHER; note = 2'-O-methylguanosine-3'-phosphorothioate
  modified_base 22: mod_base = OTHER; note = 2'-O-methylcytidine-3'-phosphorothioate
  modified_base 23: mod_base = OTHER; note = 2'-O-methylcytidine
tcactttattgagtttctgtgcc

SEQ ID NO: 90 - RNA, 23 nt, synthetic construct
  source 1..23: mol_type = other RNA
  modified_base 1: mod_base = OTHER; note = 2'-O-methyluridine-3'-phosphate 5'-(trans-5-methoxy-1,2-dithian-4-yl thiophosphate)
  modified_base 2: mod_base = OTHER; note = 2'-deoxy-2'-fluorocytidine-3'-phosphate
  modified_base 3: mod_base = OTHER; note = 2'-O-methyladenosine-3'-phosphate
  modified_base 4: mod_base = OTHER; note = 2'-O-methylcytidine-3'-phosphate
  modified_base 5: mod_base = OTHER; note = 2'-O-methyluridine-3'-phosphate
  modified_base 6: mod_base = OTHER; note = 2'-deoxy-2'-fluorouridine-3'-phosphate
  modified_base 7: mod_base = OTHER; note = 2'-O-methyluridine-3'-phosphate
  modified_base 8: mod_base = OTHER; note = 2'-deoxy-2'-fluoroadenosine-3'-phosphate
  modified_base 9: mod_base = OTHER; note = 2'-deoxy-2'-fluorouridine-3'-phosphate
  modified_base 10: mod_base = OTHER; note = 2'-O-methyluridine-3'-phosphate
  modified_base 11: mod_base = OTHER; note = 2'-O-methylguanosine-3'-phosphate
  modified_base 12: mod_base = OTHER; note = 2'-O-methyladenosine-3'-phosphate
  modified_base 13: mod_base = OTHER; note = 2'-O-methylguanosine-3'-phosphate
  modified_base 14: mod_base = OTHER; note = 2'-deoxy-2'-fluorouridine-3'-phosphate
  modified_base 15: mod_base = OTHER; note = 2'-O-methyluridine-3'-phosphate
  modified_base 16: mod_base = OTHER; note = 2'-deoxy-2'-fluorouridine-3'-phosphate
  modified_base 17: mod_base = OTHER; note = 2'-O-methylcytidine-3'-phosphate
  modified_base 18: mod_base = OTHER; note = 2'-O-methyluridine-3'-phosphate
  modified_base 19: mod_base = OTHER; note = 2'-O-methylguanosine-3'-phosphate
  modified_base 20: mod_base = OTHER; note = 2'-O-methyluridine-3'-phosphate
  modified_base 21: mod_base = OTHER; note = 2'-O-methylguanosine-3'-phosphorothioate
  modified_base 22: mod_base = OTHER; note = 2'-O-methylcytidine-3'-phosphorothioate
  modified_base 23: mod_base = OTHER; note = 2'-O-methylcytidine
tcactttattgagtttctgtgcc

SEQ ID NO: 91 - RNA, 23 nt, synthetic construct
  source 1..23: mol_type = other RNA
  modified_base 1: mod_base = OTHER; note = 2'-O-methyluridine-3'-phosphorothioate 5'-(trans-2-methoxycyclohex-1-yl phosphate)
  modified_base 2: mod_base = OTHER; note = 2'-deoxy-2'-fluorocytidine-3'-phosphorothioate
  modified_base 3: mod_base = OTHER; note = 2'-O-methyladenosine-3'-phosphate
  modified_base 4: mod_base = OTHER; note = 2'-O-methylcytidine-3'-phosphate
  modified_base 5: mod_base = OTHER; note = 2'-O-methyluridine-3'-phosphate
  modified_base 6: mod_base = OTHER; note = 2'-deoxy-2'-fluorouridine-3'-phosphate
  modified_base 7: mod_base = OTHER; note = 2'-O-methyluridine-3'-phosphate
  modified_base 8: mod_base = OTHER; note = 2'-deoxy-2'-fluoroadenosine-3'-phosphate
  modified_base 9: mod_base = OTHER; note = 2'-deoxy-2'-fluorouridine-3'-phosphate
  modified_base 10: mod_base = OTHER; note = 2'-O-methyluridine-3'-phosphate
  modified_base 11: mod_base = OTHER; note = 2'-O-methylguanosine-3'-phosphate
  modified_base 12: mod_base = OTHER; note = 2'-O-methyladenosine-3'-phosphate
  modified_base 13: mod_base = OTHER; note = 2'-O-methylguanosine-3'-phosphate
  modified_base 14: mod_base = OTHER; note = 2'-deoxy-2'-fluorouridine-3'-phosphate
  modified_base 15: mod_base = OTHER; note = 2'-O-methyluridine-3'-phosphate
  modified_base 16: mod_base = OTHER; note = 2'-deoxy-2'-fluorouridine-3'-phosphate
  modified_base 17: mod_base = OTHER; note = 2'-O-methylcytidine-3'-phosphate
  modified_base 18: mod_base = OTHER; note = 2'-O-methyluridine-3'-phosphate
  modified_base 19: mod_base = OTHER; note = 2'-O-methylguanosine-3'-phosphate
  modified_base 20: mod_base = OTHER; note = 2'-O-methyluridine-3'-phosphate
  modified_base 21: mod_base = OTHER; note = 2'-O-methylguanosine-3'-phosphorothioate
  modified_base 22: mod_base = OTHER; note = 2'-O-methylcytidine-3'-phosphorothioate
  modified_base 23: mod_base = OTHER; note = 2'-O-methylcytidine
tcactttattgagtttctgtgcc

SEQ ID NO: 92 - RNA, 23 nt, synthetic construct
  source 1..23: mol_type = other RNA
  modified_base 1: mod_base = OTHER; note = 2'-O-methyluridine-3'-phosphorothioate 5'-(trans-2-methoxycyclohex-1-yl thiophosphate)
  modified_base 2: mod_base = OTHER; note = 2'-deoxy-2'-fluorocytidine-3'-phosphorothioate
  modified_base 3: mod_base = OTHER; note = 2'-O-methyladenosine-3'-phosphate
  modified_base 4: mod_base = OTHER; note = 2'-O-methylcytidine-3'-phosphate
  modified_base 5: mod_base = OTHER; note = 2'-O-methyluridine-3'-phosphate
  modified_base 6: mod_base = OTHER; note = 2'-deoxy-2'-fluorouridine-3'-phosphate
  modified_base 7: mod_base = OTHER; note = 2'-O-methyluridine-3'-phosphate
  modified_base 8: mod_base = OTHER; note = 2'-deoxy-2'-fluoroadenosine-3'-phosphate
  modified_base 9: mod_base = OTHER; note = 2'-deoxy-2'-fluorouridine-3'-phosphate
  modified_base 10: mod_base = OTHER; note = 2'-O-methyluridine-3'-phosphate
  modified_base 11: mod_base = OTHER; note = 2'-O-methylguanosine-3'-phosphate
  modified_base 12: mod_base = OTHER; note = 2'-O-methyladenosine-3'-phosphate
  modified_base 13: mod_base = OTHER; note = 2'-O-methylguanosine-3'-phosphate
  modified_base 14: mod_base = OTHER; note = 2'-deoxy-2'-fluorouridine-3'-phosphate
  modified_base 15: mod_base = OTHER; note = 2'-O-methyluridine-3'-phosphate
  modified_base 16: mod_base = OTHER; note = 2'-deoxy-2'-fluorouridine-3'-phosphate
  modified_base 17: mod_base = OTHER; note = 2'-O-methylcytidine-3'-phosphate
  modified_base 18: mod_base = OTHER; note = 2'-O-methyluridine-3'-phosphate
  modified_base 19: mod_base = OTHER; note = 2'-O-methylguanosine-3'-phosphate
  modified_base 20: mod_base = OTHER; note = 2'-O-methyluridine-3'-phosphate
  modified_base 21: mod_base = OTHER; note = 2'-O-methylguanosine-3'-phosphorothioate
  modified_base 22: mod_base = OTHER; note = 2'-O-methylcytidine-3'-phosphorothioate
  modified_base 23: mod_base = OTHER; note = 2'-O-methylcytidine
tcactttattgagtttctgtgcc

SEQ ID NO: 93 - RNA, 23 nt, synthetic construct
  source 1..23: mol_type = other RNA
  modified_base 1: mod_base = OTHER; note = 2'-O-methyluridine-3'-phosphorothioate 5'-(trans-5-hydroxy-1,2-dithian-4-yl phosphate)
  modified_base 2: mod_base = OTHER; note = 2'-deoxy-2'-fluorocytidine-3'-phosphorothioate
  modified_base 3: mod_base = OTHER; note = 2'-O-methyladenosine-3'-phosphate
  modified_base 4: mod_base = OTHER; note = 2'-O-methylcytidine-3'-phosphate
  modified_base 5: mod_base = OTHER; note = 2'-O-methyluridine-3'-phosphate
  modified_base 6: mod_base = OTHER; note = 2'-deoxy-2'-fluorouridine-3'-phosphate
  modified_base 7: mod_base = OTHER; note = 2'-O-methyluridine-3'-phosphate
  modified_base 8: mod_base = OTHER; note = 2'-deoxy-2'-fluoroadenosine-3'-phosphate
  modified_base 9: mod_base = OTHER; note = 2'-deoxy-2'-fluorouridine-3'-phosphate
  modified_base 10: mod_base = OTHER; note = 2'-O-methyluridine-3'-phosphate
  modified_base 11: mod_base = OTHER; note = 2'-O-methylguanosine-3'-phosphate
  modified_base 12: mod_base = OTHER; note = 2'-O-methyladenosine-3'-phosphate
  modified_base 13: mod_base = OTHER; note = 2'-O-methylguanosine-3'-phosphate
  modified_base 14: mod_base = OTHER; note = 2'-deoxy-2'-fluorouridine-3'-phosphate
  modified_base 15: mod_base = OTHER; note = 2'-O-methyluridine-3'-phosphate
  modified_base 16: mod_base = OTHER; note = 2'-deoxy-2'-fluorouridine-3'-phosphate
  modified_base 17: mod_base = OTHER; note = 2'-O-methylcytidine-3'-phosphate
  modified_base 18: mod_base = OTHER; note = 2'-O-methyluridine-3'-phosphate
  modified_base 19: mod_base = OTHER; note = 2'-O-methylguanosine-3'-phosphate
  modified_base 20: mod_base = OTHER; note = 2'-O-methyluridine-3'-phosphate
  modified_base 21: mod_base = OTHER; note = 2'-O-methylguanosine-3'-phosphorothioate
  modified_base 22: mod_base = OTHER; note = 2'-O-methylcytidine-3'-phosphorothioate
  modified_base 23: mod_base = OTHER; note = 2'-O-methylcytidine
tcactttattgagtttctgtgcc

SEQ ID NO: 94 - RNA, 23 nt, synthetic construct
  source 1..23: mol_type = other RNA
  modified_base 1: mod_base = OTHER; note = 2'-O-methyluridine-3'-phosphorothioate 5'-(trans-5-hydroxy-1,2-dithian-4-yl thiophosphate)
  modified_base 2: mod_base = OTHER; note = 2'-deoxy-2'-fluorocytidine-3'-phosphorothioate
  modified_base 3: mod_base = OTHER; note = 2'-O-methyladenosine-3'-phosphate
  modified_base 4: mod_base = OTHER; note = 2'-O-methylcytidine-3'-phosphate
  modified_base 5: mod_base = OTHER; note = 2'-O-methyluridine-3'-phosphate
  modified_base 6: mod_base = OTHER; note = 2'-deoxy-2'-fluorouridine-3'-phosphate
  modified_base 7: mod_base = OTHER; note = 2'-O-methyluridine-3'-phosphate
  modified_base 8: mod_base = OTHER; note = 2'-deoxy-2'-fluoroadenosine-3'-phosphate
  modified_base 9: mod_base = OTHER; note = 2'-deoxy-2'-fluorouridine-3'-phosphate
  modified_base 10: mod_base = OTHER; note = 2'-O-methyluridine-3'-phosphate
  modified_base 11: mod_base = OTHER; note = 2'-O-methylguanosine-3'-phosphate
  modified_base 12: mod_base = OTHER; note = 2'-O-methyladenosine-3'-phosphate
  modified_base 13: mod_base = OTHER; note = 2'-O-methylguanosine-3'-phosphate
  modified_base 14: mod_base = OTHER; note = 2'-deoxy-2'-fluorouridine-3'-phosphate
  modified_base 15: mod_base = OTHER; note = 2'-O-methyluridine-3'-phosphate
  modified_base 16: mod_base = OTHER; note = 2'-deoxy-2'-fluorouridine-3'-phosphate
  modified_base 17: mod_base = OTHER; note = 2'-O-methylcytidine-3'-phosphate
  modified_base 18: mod_base = OTHER; note = 2'-O-methyluridine-3'-phosphate
  modified_base 19: mod_base = OTHER; note = 2'-O-methylguanosine-3'-phosphate
  modified_base 20: mod_base = OTHER; note = 2'-O-methyluridine-3'-phosphate
  modified_base 21: mod_base = OTHER; note = 2'-O-methylguanosine-3'-phosphorothioate
  modified_base 22: mod_base = OTHER; note = 2'-O-methylcytidine-3'-phosphorothioate
  modified_base 23: mod_base = OTHER; note = 2'-O-methylcytidine
tcactttattgagtttctgtgcc

SEQ ID NO: 95 - RNA, 23 nt, synthetic construct
  source 1..23: mol_type = other RNA
  modified_base 1: mod_base = OTHER; note = 2'-O-methyluridine-3'-phosphorothioate 5'-(cis-3,3,5-trimethyl-1,2-dithiolan-4-yl phosphate)
  modified_base 2: mod_base = OTHER; note = 2'-deoxy-2'-fluorocytidine-3'-phosphorothioate
  modified_base 3: mod_base = OTHER; note = 2'-O-methyladenosine-3'-phosphate
  modified_base 4: mod_base = OTHER; note = 2'-O-methylcytidine-3'-phosphate
  modified_base 5: mod_base = OTHER; note = 2'-O-methyluridine-3'-phosphate
  modified_base 6: mod_base = OTHER; note = 2'-deoxy-2'-fluorouridine-3'-phosphate
  modified_base 7: mod_base = OTHER; note = 2'-O-methyluridine-3'-phosphate
  modified_base 8: mod_base = OTHER; note = 2'-deoxy-2'-fluoroadenosine-3'-phosphate
  modified_base 9: mod_base = OTHER; note = 2'-deoxy-2'-fluorouridine-3'-phosphate
  modified_base 10: mod_base = OTHER; note = 2'-O-methyluridine-3'-phosphate
  modified_base 11: mod_base = OTHER; note = 2'-O-methylguanosine-3'-phosphate
  modified_base 12: mod_base = OTHER; note = 2'-O-methyladenosine-3'-phosphate
  modified_base 13: mod_base = OTHER; note = 2'-O-methylguanosine-3'-phosphate
  modified_base 14: mod_base = OTHER; note = 2'-deoxy-2'-fluorouridine-3'-phosphate
  modified_base 15: mod_base = OTHER; note = 2'-O-methyluridine-3'-phosphate
  modified_base 16: mod_base = OTHER; note = 2'-deoxy-2'-fluorouridine-3'-phosphate
  modified_base 17: mod_base = OTHER; note = 2'-O-methylcytidine-3'-phosphate
  modified_base 18: mod_base = OTHER; note = 2'-O-methyluridine-3'-phosphate
  modified_base 19: mod_base = OTHER; note = 2'-O-methylguanosine-3'-phosphate
  modified_base 20: mod_base = OTHER; note = 2'-O-methyluridine-3'-phosphate
  modified_base 21: mod_base = OTHER; note = 2'-O-methylguanosine-3'-phosphorothioate
  modified_base 22: mod_base = OTHER; note = 2'-O-methylcytidine-3'-phosphorothioate
  modified_base 23: mod_base = OTHER; note = 2'-O-methylcytidine
tcactttattgagtttctgtgcc

SEQ ID NO: 96 - RNA, 23 nt, synthetic construct
  source 1..23: mol_type = other RNA
  modified_base 1: mod_base = OTHER; note = 2'-O-methyluridine-3'-phosphorothioate 5'-(cis-3,3,5-trimethyl-1,2-dithiolan-4-yl thiophosphate)
  modified_base 2: mod_base = OTHER; note = 2'-deoxy-2'-fluorocytidine-3'-phosphorothioate
  modified_base 3: mod_base = OTHER; note = 2'-O-methyladenosine-3'-phosphate
  modified_base 4: mod_base = OTHER; note = 2'-O-methylcytidine-3'-phosphate
  modified_base 5: mod_base = OTHER; note = 2'-O-methyluridine-3'-phosphate
  modified_base 6: mod_base = OTHER; note = 2'-deoxy-2'-fluorouridine-3'-phosphate
  modified_base 7: mod_base = OTHER; note = 2'-O-methyluridine-3'-phosphate
  modified_base 8: mod_base = OTHER; note = 2'-deoxy-2'-fluoroadenosine-3'-phosphate
  modified_base 9: mod_base = OTHER; note = 2'-deoxy-2'-fluorouridine-3'-phosphate
  modified_base 10: mod_base = OTHER; note = 2'-O-methyluridine-3'-phosphate
  modified_base 11: mod_base = OTHER; note = 2'-O-methylguanosine-3'-phosphate
  modified_base 12: mod_base = OTHER; note = 2'-O-methyladenosine-3'-phosphate
  modified_base 13: mod_base = OTHER; note = 2'-O-methylguanosine-3'-phosphate
  modified_base 14: mod_base = OTHER; note = 2'-deoxy-2'-fluorouridine-3'-phosphate
  modified_base 15: mod_base = OTHER; note = 2'-O-methyluridine-3'-phosphate
  modified_base 16: mod_base = OTHER; note = 2'-deoxy-2'-fluorouridine-3'-phosphate
  modified_base 17: mod_base = OTHER; note = 2'-O-methylcytidine-3'-phosphate
  modified_base 18: mod_base = OTHER; note = 2'-O-methyluridine-3'-phosphate
  modified_base 19: mod_base = OTHER; note = 2'-O-methylguanosine-3'-phosphate
  modified_base 20: mod_base = OTHER; note = 2'-O-methyluridine-3'-phosphate
  modified_base 21: mod_base = OTHER; note = 2'-O-methylguanosine-3'-phosphorothioate
  modified_base 22: mod_base = OTHER; note = 2'-O-methylcytidine-3'-phosphorothioate
  modified_base 23: mod_base = OTHER; note = 2'-O-methylcytidine
tcactttattgagtttctgtgcc

SEQ ID NO: 97 - RNA, 23 nt, synthetic construct
  source 1..23: mol_type = other RNA
  modified_base 1: mod_base = OTHER; note = 2'-O-methyluridine-3'-phosphorothioate 5'-(3,3,5,5-tetramethyl-1,2-dithiolan-4-yl phosphate)
  modified_base 2: mod_base = OTHER; note = 2'-deoxy-2'-fluorocytidine-3'-phosphorothioate
  modified_base 3: mod_base = OTHER; note = 2'-O-methyladenosine-3'-phosphate
  modified_base 4: mod_base = OTHER; note = 2'-O-methylcytidine-3'-phosphate
  modified_base 5: mod_base = OTHER; note = 2'-O-methyluridine-3'-phosphate
  modified_base 6: mod_base = OTHER; note = 2'-deoxy-2'-fluorouridine-3'-phosphate
  modified_base 7: mod_base = OTHER; note = 2'-O-methyluridine-3'-phosphate
  modified_base 8: mod_base = OTHER; note = 2'-deoxy-2'-fluoroadenosine-3'-phosphate
  modified_base 9: mod_base = OTHER; note = 2'-deoxy-2'-fluorouridine-3'-phosphate
  modified_base 10: mod_base = OTHER; note = 2'-O-methyluridine-3'-phosphate
  modified_base 11: mod_base = OTHER; note = 2'-O-methylguanosine-3'-phosphate
  modified_base 12: mod_base = OTHER; note = 2'-O-methyladenosine-3'-phosphate
  modified_base 13: mod_base = OTHER; note = 2'-O-methylguanosine-3'-phosphate
  modified_base 14: mod_base = OTHER; note = 2'-deoxy-2'-fluorouridine-3'-phosphate
  modified_base 15: mod_base = OTHER; note = 2'-O-methyluridine-3'-phosphate
  modified_base 16: mod_base = OTHER; note = 2'-deoxy-2'-fluorouridine-3'-phosphate
  modified_base 17: mod_base = OTHER; note = 2'-O-methylcytidine-3'-phosphate
  modified_base 18: mod_base = OTHER; note = 2'-O-methyluridine-3'-phosphate
  modified_base 19: mod_base = OTHER; note = 2'-O-methylguanosine-3'-phosphate
  modified_base 20: mod_base = OTHER; note = 2'-O-methyluridine-3'-phosphate
  modified_base 21: mod_base = OTHER; note = 2'-O-methylguanosine-3'-phosphorothioate
  modified_base 22: mod_base = OTHER; note = 2'-O-methylcytidine-3'-phosphorothioate
  modified_base 23: mod_base = OTHER; note = 2'-O-methylcytidine
tcactttattgagtttctgtgcc

SEQ ID NO: 98 - RNA, 23 nt, synthetic construct
  source 1..23: mol_type = other RNA
  modified_base 1: mod_base = OTHER; note = 2'-O-methyluridine-3'-phosphorothioate 5'-(3,3,5,5-tetramethyl-1,2-dithiolan-4-yl thiophosphate)
  modified_base 2: mod_base = OTHER; note = 2'-deoxy-2'-fluorocytidine-3'-phosphorothioate
  modified_base 3: mod_base = OTHER; note = 2'-O-methyladenosine-3'-phosphate
  modified_base 4: mod_base = OTHER; note = 2'-O-methylcytidine-3'-phosphate
  modified_base 5: mod_base = OTHER; note = 2'-O-methyluridine-3'-phosphate
  modified_base 6: mod_base = OTHER; note = 2'-deoxy-2'-fluorouridine-3'-phosphate
  modified_base 7: mod_base = OTHER; note = 2'-O-methyluridine-3'-phosphate
  modified_base 8: mod_base = OTHER; note = 2'-deoxy-2'-fluoroadenosine-3'-phosphate
  modified_base 9: mod_base = OTHER; note = 2'-deoxy-2'-fluorouridine-3'-phosphate
  modified_base 10: mod_base = OTHER; note = 2'-O-methyluridine-3'-phosphate
  modified_base 11: mod_base = OTHER; note = 2'-O-methylguanosine-3'-phosphate
  modified_base 12: mod_base = OTHER; note = 2'-O-methyladenosine-3'-phosphate
  modified_base 13: mod_base = OTHER; note = 2'-O-methylguanosine-3'-phosphate
  modified_base 14: mod_base = OTHER; note = 2'-deoxy-2'-fluorouridine-3'-phosphate
  modified_base 15: mod_base = OTHER; note = 2'-O-methyluridine-3'-phosphate
  modified_base 16: mod_base = OTHER; note = 2'-deoxy-2'-fluorouridine-3'-phosphate
  modified_base 17: mod_base = OTHER; note = 2'-O-methylcytidine-3'-phosphate
  modified_base 18: mod_base = OTHER; note = 2'-O-methyluridine-3'-phosphate
  modified_base 19: mod_base = OTHER; note = 2'-O-methylguanosine-3'-phosphate
  modified_base 20: mod_base = OTHER; note = 2'-O-methyluridine-3'-phosphate
  modified_base 21: mod_base = OTHER; note = 2'-O-methylguanosine-3'-phosphorothioate
  modified_base 22: mod_base = OTHER; note = 2'-O-methylcytidine-3'-phosphorothioate
  modified_base 23: mod_base = OTHER; note = 2'-O-methylcytidine
tcactttattgagtttctgtgcc

SEQ ID NO: 99 - DNA, 10 bp, synthetic construct
  source 1..10: mol_type = other DNA
  modified_base 1: mod_base = OTHER; note = 2'-deoxythymidine-3'-phosphate 5'-(trans-5-methoxy-1,2-dithian-4-yl phosphate)
tttttttttt

SEQ ID NO: 100 - DNA, 10 bp, synthetic construct
  source 1..10: mol_type = other DNA
  modified_base 1: mod_base = OTHER; note = 2'-deoxythymidine-3'-phosphate 5'-(trans-5-methoxy-1,2-dithian-4-yl thiophosphate)
tttttttttt

SEQ ID NO: 101 - RNA, 23 nt, synthetic construct
  source 1..23: mol_type = other RNA
  modified_base 1: mod_base = OTHER; note = 2'-O-methyluridine-3'-phosphate 5'-(14-hydroxy-7,8-dithiatetradecyl phosphate)
  modified_base 2: mod_base = OTHER; note = 2'-deoxy-2'-fluorouridine-3'-phosphate
  modified_base 3: mod_base = OTHER; note = 2'-O-methyladenosine-3'-phosphate
  modified_base 4: mod_base = OTHER; note = 2'-deoxy-2'-fluorouridine-3'-phosphate
  modified_base 5: mod_base = OTHER; note = 2'-O-methyladenosine-3'-phosphate
  modified_base 6: mod_base = OTHER; note = 2'-deoxy-2'-fluoroguanosine-3'-phosphate
  modified_base 7: mod_base = OTHER; note = 2'-O-methyladenosine-3'-phosphate
  modified_base 8: mod_base = OTHER; note = 2'-deoxy-2'-fluoroguanosine-3'-phosphate
  modified_base 9: mod_base = OTHER; note = 2'-O-methylcytidine-3'-phosphate
  modified_base 10: mod_base = OTHER; note = 2'-deoxy-2'-fluoroadenosine-3'-phosphate
  modified_base 11: mod_base = OTHER; note = 2'-O-methyladenosine-3'-phosphate
  modified_base 12: mod_base = OTHER; note = 2'-O-methylguanosine-3'-phosphate
  modified_base 13: mod_base = OTHER; note = 2'-O-methyladenosine-3'-phosphate
  modified_base 14: mod_base = OTHER; note = 2'-deoxy-2'-fluoroadenosine-3'-phosphate
  modified_base 15: mod_base = OTHER; note = 2'-O-methylcytidine-3'-phosphate
  modified_base 16: mod_base = OTHER; note = 2'-deoxy-2'-fluoroadenosine-3'-phosphate
  modified_base 17: mod_base = OTHER; note = 2'-O-methylcytidine-3'-phosphate
  modified_base 18: mod_base = OTHER; note = 2'-deoxy-2'-fluorouridine-3'-phosphate
  modified_base 19: mod_base = OTHER; note = 2'-O-methylguanosine-3'-phosphate
  modified_base 20: mod_base = OTHER; note = 2'-deoxy-2'-fluorouridine-3'-phosphate
  modified_base 21: mod_base = OTHER; note = 2'-O-methyluridine-3'-phosphate
  modified_base 22: mod_base = OTHER; note = 2'-O-methyluridine-3'-phosphate
  modified_base 23: mod_base = OTHER; note = 2'-O-methyluridine
ttatagagcaagaacactgtttt

SEQ ID NO: 102 - RNA, 22 nt, synthetic construct
  source 1..22: mol_type = other RNA
  modified_base 1: mod_base = OTHER; note = 2'-O-methyluridine-3'-phosphate
  modified_base 2: mod_base = OTHER; note = 2'-deoxy-2'-fluorouridine-3'-phosphate
  modified_base 3: mod_base = OTHER; note = 2'-O-methyladenosine-3'-phosphate
  modified_base 4: mod_base = OTHER; note = 2'-deoxy-2'-fluorouridine-3'-phosphate
  modified_base 5: mod_base = OTHER; note = 2'-O-methyladenosine-3'-phosphate
  modified_base 6: mod_base = OTHER; note = 2'-deoxy-2'-fluoroguanosine-3'-(phosphate (14-hydroxy-7,8-dithiatetradecyl) ester)
  modified_base 7: mod_base = OTHER; note = 2'-deoxy-2'-fluoroguanosine-3'-phosphate
  modified_base 8: mod_base = OTHER; note = 2'-O-methylcytidine-3'-phosphate
  modified_base 9: mod_base = OTHER; note = 2'-deoxy-2'-fluoroadenosine-3'-phosphate
  modified_base 10: mod_base = OTHER; note = 2'-O-methyladenosine-3'-phosphate
  modified_base 11: mod_base = OTHER; note = 2'-O-methylguanosine-3'-phosphate
  modified_base 12: mod_base = OTHER; note = 2'-O-methyladenosine-3'-phosphate
  modified_base 13: mod_base = OTHER; note = 2'-deoxy-2'-fluoroadenosine-3'-phosphate
  modified_base 14: mod_base = OTHER; note = 2'-O-methylcytidine-3'-phosphate
  modified_base 15: mod_base = OTHER; note = 2'-deoxy-2'-fluoroadenosine-3'-phosphate
  modified_base 16: mod_base = OTHER; note = 2'-O-methylcytidine-3'-phosphate
  modified_base 17: mod_base = OTHER; note = 2'-deoxy-2'-fluorouridine-3'-phosphate
  modified_base 18: mod_base = OTHER; note = 2'-O-methylguanosine-3'-phosphate
  modified_base 19: mod_base = OTHER; note = 2'-deoxy-2'-fluorouridine-3'-phosphate
  modified_base 20: mod_base = OTHER; note = 2'-O-methyluridine-3'-phosphate
  modified_base 21: mod_base = OTHER; note = 2'-O-methyluridine-3'-phosphate
  modified_base 22: mod_base = OTHER; note = 2'-O-methyluridine
ttataggcaagaacactgtttt

SEQ ID NO: 103 - RNA, 23 nt, synthetic construct
  source 1..23: mol_type = other RNA
  modified_base 1: mod_base = OTHER; note = 2'-O-methyluridine-3'-phosphorothioate 5'-(trans-2-methoxycyclohex-1-yl phosphate)
  modified_base 2: mod_base = OTHER; note = 2'-deoxy-2'-fluorocytidine-3'-phosphorothioate
  modified_base 3: mod_base = OTHER; note = 2'-O-methyladenosine-3'-phosphate
  modified_base 4: mod_base = OTHER; note = 2'-O-methylcytidine-3'-phosphate
  modified_base 5: mod_base = OTHER; note = 2'-O-methyluridine-3'-phosphate
  modified_base 6: mod_base = OTHER; note = 2'-deoxy-2'-fluorouridine-3'-phosphate
  modified_base 7: mod_base = OTHER; note = 2'-O-methyluridine-3'-phosphate
  modified_base 8: mod_base = OTHER; note = 2'-deoxy-2'-fluoroadenosine-3'-phosphate
  modified_base 9: mod_base = OTHER; note = 2'-deoxy-2'-fluorouridine-3'-phosphate
  modified_base 10: mod_base = OTHER; note = 2'-O-methyluridine-3'-phosphate
  modified_base 11: mod_base = OTHER; note = 2'-O-methylguanosine-3'-phosphate
  modified_base 12: mod_base = OTHER; note = 2'-O-methyladenosine-3'-phosphate
  modified_base 13: mod_base = OTHER; note = 2'-O-methylguanosine-3'-phosphate
  modified_base 14: mod_base = OTHER; note = 2'-deoxy-2'-fluorouridine-3'-phosphate
  modified_base 15: mod_base = OTHER; note = 2'-O-methyluridine-3'-phosphate
  modified_base 16: mod_base = OTHER; note = 2'-deoxy-2'-fluorouridine-3'-phosphate
  modified_base 17: mod_base = OTHER; note = 2'-O-methylcytidine-3'-phosphate
  modified_base 18: mod_base = OTHER; note = 2'-O-methyluridine-3'-phosphate
  modified_base 19: mod_base = OTHER; note = 2'-O-methylguanosine-3'-phosphate
  modified_base 20: mod_base = OTHER; note = 2'-O-methyluridine-3'-phosphate
  modified_base 21: mod_base = OTHER; note = 2'-O-methylguanosine-3'-phosphorothioate
  modified_base 22: mod_base = OTHER; note = 2'-O-methylcytidine-3'-phosphorothioate
  modified_base 23: mod_base = OTHER; note = 2'-O-methylcytidine
tcactttattgagtttctgtgcc

SEQ ID NO: 104 - RNA, 23 nt, synthetic construct
  source 1..23: mol_type = other RNA
  modified_base 1: mod_base = OTHER; note = 2'-O-methyluridine-3'-phosphorothioate 5'-(trans-2-methoxycyclohex-1-yl thiophosphate)
  modified_base 2: mod_base = OTHER; note = 2'-deoxy-2'-fluorocytidine-3'-phosphorothioate
  modified_base 3: mod_base = OTHER; note = 2'-O-methyladenosine-3'-phosphate
  modified_base 4: mod_base = OTHER; note = 2'-O-methylcytidine-3'-phosphate
  modified_base 5: mod_base = OTHER; note = 2'-O-methyluridine-3'-phosphate
  modified_base 6: mod_base = OTHER; note = 2'-deoxy-2'-fluorouridine-3'-phosphate
  modified_base 7: mod_base = OTHER; note = 2'-O-methyluridine-3'-phosphate
  modified_base 8: mod_base = OTHER; note = 2'-deoxy-2'-fluoroadenosine-3'-phosphate
  modified_base 9: mod_base = OTHER; note = 2'-deoxy-2'-fluorouridine-3'-phosphate
  modified_base 10: mod_base = OTHER; note = 2'-O-methyluridine-3'-phosphate
  modified_base 11: mod_base = OTHER; note = 2'-O-methylguanosine-3'-phosphate
  modified_base 12: mod_base = OTHER; note = 2'-O-methyladenosine-3'-phosphate
  modified_base 13: mod_base = OTHER; note = 2'-O-methylguanosine-3'-phosphate
  modified_base 14: mod_base = OTHER; note = 2'-deoxy-2'-fluorouridine-3'-phosphate
  modified_base 15: mod_base = OTHER; note = 2'-O-methyluridine-3'-phosphate
  modified_base 16: mod_base = OTHER; note = 2'-deoxy-2'-fluorouridine-3'-phosphate
  modified_base 17: mod_base = OTHER; note = 2'-O-methylcytidine-3'-phosphate
  modified_base 18: mod_base = OTHER; note = 2'-O-methyluridine-3'-phosphate
  modified_base 19: mod_base = OTHER; note = 2'-O-methylguanosine-3'-phosphate
  modified_base 20: mod_base = OTHER; note = 2'-O-methyluridine-3'-phosphate
  modified_base 21: mod_base = OTHER; note = 2'-O-methylguanosine-3'-phosphorothioate
  modified_base 22: mod_base = OTHER; note = 2'-O-methylcytidine-3'-phosphorothioate
  modified_base 23: mod_base = OTHER; note = 2'-O-methylcytidine
tcactttattgagtttctgtgcc

SEQ ID NO: 105 - RNA, 23 nt, synthetic construct
  source 1..23: mol_type = other RNA
  modified_base 1: mod_base = OTHER; note = 2'-O-methyluridine-3'-phosphorothioate 5'-(trans-5-hydroxy-1,2-dithian-4-yl phosphate)
  modified_base 2: mod_base = OTHER; note = 2'-deoxy-2'-fluorocytidine-3'-phosphorothioate
  modified_base 3: mod_base = OTHER; note = 2'-O-methyladenosine-3'-phosphate
  modified_base 4: mod_base = OTHER; note = 2'-O-methylcytidine-3'-phosphate
  modified_base 5: mod_base = OTHER; note = 2'-O-methyluridine-3'-phosphate
  modified_base 6: mod_base = OTHER; note = 2'-deoxy-2'-fluorouridine-3'-phosphate
  modified_base 7: mod_base = OTHER; note = 2'-O-methyluridine-3'-phosphate
  modified_base 8: mod_base = OTHER; note = 2'-deoxy-2'-fluoroadenosine-3'-phosphate
  modified_base 9: mod_base = OTHER; note = 2'-deoxy-2'-fluorouridine-3'-phosphate
  modified_base 10: mod_base = OTHER; note = 2'-O-methyluridine-3'-phosphate
  modified_base 11: mod_base = OTHER; note = 2'-O-methylguanosine-3'-phosphate
  modified_base 12: mod_base = OTHER; note = 2'-O-methyladenosine-3'-phosphate
  modified_base 13: mod_base = OTHER; note = 2'-O-methylguanosine-3'-phosphate
  modified_base 14: mod_base = OTHER; note = 2'-deoxy-2'-fluorouridine-3'-phosphate
  modified_base 15: mod_base = OTHER; note = 2'-O-methyluridine-3'-phosphate
  modified_base 16: mod_base = OTHER; note = 2'-deoxy-2'-fluorouridine-3'-phosphate
  modified_base 17: mod_base = OTHER; note = 2'-O-methylcytidine-3'-phosphate
  modified_base 18: mod_base = OTHER; note = 2'-O-methyluridine-3'-phosphate
  modified_base 19: mod_base = OTHER; note = 2'-O-methylguanosine-3'-phosphate
  modified_base 20: mod_base = OTHER; note = 2'-O-methyluridine-3'-phosphate
  modified_base 21: mod_base = OTHER; note = 2'-O-methylguanosine-3'-phosphorothioate
  modified_base 22: mod_base = OTHER; note = 2'-O-methylcytidine-3'-phosphorothioate
  modified_base 23: mod_base = OTHER; note = 2'-O-methylcytidine
tcactttattgagtttctgtgcc

SEQ ID NO: 106 - RNA, 23 nt, synthetic construct
  source 1..23: mol_type = other RNA
  modified_base 1: mod_base = OTHER; note = 2'-O-methyluridine-3'-phosphorothioate 5'-(trans-5-hydroxy-1,2-dithian-4-yl thiophosphate)
  modified_base 2: mod_base = OTHER; note = 2'-deoxy-2'-fluorocytidine-3'-phosphorothioate
  modified_base 3: mod_base = OTHER; note = 2'-O-methyladenosine-3'-phosphate
  modified_base 4: mod_base = OTHER; note = 2'-O-methylcytidine-3'-phosphate
  modified_base 5: mod_base = OTHER; note = 2'-O-methyluridine-3'-phosphate
  modified_base 6: mod_base = OTHER; note = 2'-deoxy-2'-fluorouridine-3'-phosphate
  modified_base 7: mod_base = OTHER; note = 2'-O-methyluridine-3'-phosphate
  modified_base 8: mod_base = OTHER; note = 2'-deoxy-2'-fluoroadenosine-3'-phosphate
  modified_base 9: mod_base = OTHER; note = 2'-deoxy-2'-fluorouridine-3'-phosphate
  modified_base 10: mod_base = OTHER; note = 2'-O-methyluridine-3'-phosphate
  modified_base 11: mod_base = OTHER; note = 2'-O-methylguanosine-3'-phosphate
  modified_base 12: mod_base = OTHER; note = 2'-O-methyladenosine-3'-phosphate
  modified_base 13: mod_base = OTHER; note = 2'-O-methylguanosine-3'-phosphate
  modified_base 14: mod_base = OTHER; note = 2'-deoxy-2'-fluorouridine-3'-phosphate
  modified_base 15: mod_base = OTHER; note = 2'-O-methyluridine-3'-phosphate
  modified_base 16: mod_base = OTHER; note = 2'-deoxy-2'-fluorouridine-3'-phosphate
  modified_base 17: mod_base = OTHER; note = 2'-O-methylcytidine-3'-phosphate
  modified_base 18: mod_base = OTHER; note = 2'-O-methyluridine-3'-phosphate
  modified_base 19: mod_base = OTHER; note = 2'-O-methylguanosine-3'-phosphate
  modified_base 20: mod_base = OTHER; note = 2'-O-methyluridine-3'-phosphate
  modified_base 21: mod_base = OTHER; note = 2'-O-methylguanosine-3'-phosphorothioate
  modified_base 22: mod_base = OTHER; note = 2'-O-methylcytidine-3'-phosphorothioate
  modified_base 23: mod_base = OTHER; note = 2'-O-methylcytidine
tcactttattgagtttctgtgcc

SEQ ID NO: 107 - RNA, 23 nt, synthetic construct
  source 1..23: mol_type = other RNA
  modified_base 1: mod_base = OTHER; note = 2'-O-methyluridine-3'-phosphorothioate 5'-(cis-3,3,5-trimethyl-1,2-dithiolan-4-yl phosphate)
  modified_base 2: mod_base = OTHER; note = 2'-deoxy-2'-fluorocytidine-3'-phosphorothioate
  modified_base 3: mod_base = OTHER; note = 2'-O-methyladenosine-3'-phosphate
  modified_base 4: mod_base = OTHER; note = 2'-O-methylcytidine-3'-phosphate
  modified_base 5: mod_base = OTHER; note = 2'-O-methyluridine-3'-phosphate
  modified_base 6: mod_base = OTHER; note = 2'-deoxy-2'-fluorouridine-3'-phosphate
  modified_base 7: mod_base = OTHER; note = 2'-O-methyluridine-3'-phosphate
  modified_base 8: mod_base = OTHER; note = 2'-deoxy-2'-fluoroadenosine-3'-phosphate
  modified_base 9: mod_base = OTHER; note = 2'-deoxy-2'-fluorouridine-3'-phosphate
  modified_base 10: mod_base = OTHER; note = 2'-O-methyluridine-3'-phosphate
  modified_base 11: mod_base = OTHER; note = 2'-O-methylguanosine-3'-phosphate
  modified_base 12: mod_base = OTHER; note = 2'-O-methyladenosine-3'-phosphate
  modified_base 13: mod_base = OTHER; note = 2'-O-methylguanosine-3'-phosphate
  modified_base 14: mod_base = OTHER; note = 2'-deoxy-2'-fluorouridine-3'-phosphate
  modified_base 15: mod_base = OTHER; note = 2'-O-methyluridine-3'-phosphate
  modified_base 16: mod_base = OTHER; note = 2'-deoxy-2'-fluorouridine-3'-phosphate
  modified_base 17: mod_base = OTHER; note = 2'-O-methylcytidine-3'-phosphate
  modified_base 18: mod_base = OTHER; note = 2'-O-methyluridine-3'-phosphate
  modified_base 19: mod_base = OTHER; note = 2'-O-methylguanosine-3'-phosphate
  modified_base 20: mod_base = OTHER; note = 2'-O-methyluridine-3'-phosphate
  modified_base 21: mod_base = OTHER; note = 2'-O-methylguanosine-3'-phosphorothioate
  modified_base 22: mod_base = OTHER; note = 2'-O-methylcytidine-3'-phosphorothioate
  modified_base 23: mod_base = OTHER; note = 2'-O-methylcytidine
tcactttattgagtttctgtgcc

SEQ ID NO: 108 - RNA, 23 nt, synthetic construct
  source 1..23: mol_type = other RNA
  modified_base 1: mod_base = OTHER; note = 2'-O-methyluridine-3'-phosphorothioate 5'-(cis-3,3,5-trimethyl-1,2-dithiolan-4-yl thiophosphate)
  modified_base 2: mod_base = OTHER; note = 2'-deoxy-2'-fluorocytidine-3'-phosphorothioate
  modified_base 3: mod_base = OTHER; note = 2'-O-methyladenosine-3'-phosphate
  modified_base 4: mod_base = OTHER; note = 2'-O-methylcytidine-3'-phosphate
  modified_base 5: mod_base = OTHER; note = 2'-O-methyluridine-3'-phosphate
  modified_base 6: mod_base = OTHER; note = 2'-deoxy-2'-fluorouridine-3'-phosphate
  modified_base 7: mod_base = OTHER; note = 2'-O-methyluridine-3'-phosphate
  modified_base 8: mod_base = OTHER; note = 2'-deoxy-2'-fluoroadenosine-3'-phosphate
  modified_base 9: mod_base = OTHER; note = 2'-deoxy-2'-fluorouridine-3'-phosphate
  modified_base 10: mod_base = OTHER; note = 2'-O-methyluridine-3'-phosphate
  modified_base 11: mod_base = OTHER; note = 2'-O-methylguanosine-3'-phosphate
  modified_base 12: mod_base = OTHER; note = 2'-O-methyladenosine-3'-phosphate
  modified_base 13: mod_base = OTHER; note = 2'-O-methylguanosine-3'-phosphate
  modified_base 14: mod_base = OTHER; note = 2'-deoxy-2'-fluorouridine-3'-phosphate
  modified_base 15: mod_base = OTHER; note = 2'-O-methyluridine-3'-phosphate
  modified_base 16: mod_base = OTHER; note = 2'-deoxy-2'-fluorouridine-3'-phosphate
  modified_base 17: mod_base = OTHER; note = 2'-O-methylcytidine-3'-phosphate
  modified_base 18: mod_base = OTHER; note = 2'-O-methyluridine-3'-phosphate
  modified_base 19: mod_base = OTHER; note = 2'-O-methylguanosine-3'-phosphate
  modified_base 20: mod_base = OTHER; note = 2'-O-methyluridine-3'-phosphate
  modified_base 21: mod_base = OTHER; note = 2'-O-methylguanosine-3'-phosphorothioate
  modified_base 22: mod_base = OTHER; note = 2'-O-methylcytidine-3'-phosphorothioate
  modified_base 23: mod_base = OTHER; note = 2'-O-methylcytidine
tcactttattgagtttctgtgcc

SEQ ID NO: 109 - RNA, 23 nt, synthetic construct
  source 1..23: mol_type = other RNA
  modified_base 1: mod_base = OTHER; note = 2'-O-methyluridine-3'-phosphorothioate 5'-(3,3,5,5-tetramethyl-1,2-dithiolan-4-yl phosphate)
  modified_base 2: mod_base = OTHER; note = 2'-deoxy-2'-fluorocytidine-3'-phosphorothioate
  modified_base 3: mod_base = OTHER; note = 2'-O-methyladenosine-3'-phosphate
  modified_base 4: mod_base = OTHER; note = 2'-O-methylcytidine-3'-phosphate
  modified_base 5: mod_base = OTHER; note = 2'-O-methyluridine-3'-phosphate
  modified_base 6: mod_base = OTHER; note = 2'-deoxy-2'-fluorouridine-3'-phosphate
  modified_base 7: mod_base = OTHER; note = 2'-O-methyluridine-3'-phosphate
  modified_base 8: mod_base = OTHER; note = 2'-deoxy-2'-fluoroadenosine-3'-phosphate
  modified_base 9: mod_base = OTHER; note = 2'-deoxy-2'-fluorouridine-3'-phosphate
  modified_base 10: mod_base = OTHER; note = 2'-O-methyluridine-3'-phosphate
  modified_base 11: mod_base = OTHER; note = 2'-O-methylguanosine-3'-phosphate
  modified_base 12: mod_base = OTHER; note = 2'-O-methyladenosine-3'-phosphate
  modified_base 13: mod_base = OTHER; note = 2'-O-methylguanosine-3'-phosphate
  modified_base 14: mod_base = OTHER; note = 2'-deoxy-2'-fluorouridine-3'-phosphate
  modified_base 15: mod_base = OTHER; note = 2'-O-methyluridine-3'-phosphate
  modified_base 16: mod_base = OTHER; note = 2'-deoxy-2'-fluorouridine-3'-phosphate
  modified_base 17: mod_base = OTHER; note = 2'-O-methylcytidine-3'-phosphate
  modified_base 18: mod_base = OTHER; note = 2'-O-methyluridine-3'-phosphate
  modified_base 19: mod_base = OTHER; note = 2'-O-methylguanosine-3'-phosphate
  modified_base 20: mod_base = OTHER; note = 2'-O-methyluridine-3'-phosphate
  modified_base 21: mod_base = OTHER; note = 2'-O-methylguanosine-3'-phosphorothioate
  modified_base 22: mod_base = OTHER; note = 2'-O-methylcytidine-3'-phosphorothioate
  modified_base 23: mod_base = OTHER; note = 2'-O-methylcytidine
tcactttattgagtttctgtgcc

SEQ ID NO: 110 - RNA, 23 nt, synthetic construct
  source 1..23: mol_type = other RNA
  modified_base 1: mod_base = OTHER; note = 2'-O-methyluridine-3'-phosphorothioate 5'-(3,3,5,5-tetramethyl-1,2-dithiolan-4-yl thiophosphate)
  modified_base 2: mod_base = OTHER; note = 2'-deoxy-2'-fluorocytidine-3'-phosphorothioate
  modified_base 3: mod_base = OTHER; note = 2'-O-methyladenosine-3'-phosphate
  modified_base 4: mod_base = OTHER; note = 2'-O-methylcytidine-3'-phosphate
  modified_base 5: mod_base = OTHER; note = 2'-O-methyluridine-3'-phosphate
  modified_base 6: mod_base = OTHER; note = 2'-deoxy-2'-fluorouridine-3'-phosphate
  modified_base 7: mod_base = OTHER; note = 2'-O-methyluridine-3'-phosphate
  modified_base 8: mod_base = OTHER; note = 2'-deoxy-2'-fluoroadenosine-3'-phosphate
  modified_base 9: mod_base = OTHER; note = 2'-deoxy-2'-fluorouridine-3'-phosphate
  modified_base 10: mod_base = OTHER; note = 2'-O-methyluridine-3'-phosphate
  modified_base 11: mod_base = OTHER; note = 2'-O-methylguanosine-3'-phosphate
  modified_base 12: mod_base = OTHER; note = 2'-O-methyladenosine-3'-phosphate
  modified_base 13: mod_base = OTHER; note = 2'-O-methylguanosine-3'-phosphate
  modified_base 14: mod_base = OTHER; note = 2'-deoxy-2'-fluorouridine-3'-phosphate
  modified_base 15: mod_base = OTHER; note = 2'-O-methyluridine-3'-phosphate
  modified_base 16: mod_base = OTHER; note = 2'-deoxy-2'-fluorouridine-3'-phosphate
  modified_base 17: mod_base = OTHER; note = 2'-O-methylcytidine-3'-phosphate
  modified_base 18: mod_base = OTHER; note = 2'-O-methyluridine-3'-phosphate
  modified_base 19: mod_base = OTHER; note = 2'-O-methylguanosine-3'-phosphate
  modified_base 20: mod_base = OTHER; note = 2'-O-methyluridine-3'-phosphate
  modified_base 21: mod_base = OTHER; note = 2'-O-methylguanosine-3'-phosphorothioate
  modified_base 22: mod_base = OTHER; note = 2'-O-methylcytidine-3'-phosphorothioate
  modified_base 23: mod_base = OTHER; note = 2'-O-methylcytidine
tcactttattgagtttctgtgcc

SEQ ID NO: 111 - RNA, 21 nt, synthetic construct
  source 1..21: mol_type = other RNA
  modified_base 1: mod_base = OTHER; note = 2'-O-methylcytidine-3'-phosphorothioate
  modified_base 2: mod_base = OTHER; note = 2'-O-methyladenosine-3'-phosphorothioate
  modified_base 3: mod_base = OTHER; note = 2'-O-methylcytidine-3'-phosphate
  modified_base 4: mod_base = OTHER; note = 2'-O-methyladenosine-3'-phosphate
  modified_base 5: mod_base = OTHER; note = 2'-O-methylguanosine-3'-phosphate
  modified_base 6: mod_base = OTHER; note = 2'-O-methyladenosine-3'-phosphate
  modified_base 7: mod_base = OTHER; note = 2'-deoxy-2'-fluoroadenosine-3'-phosphate
  modified_base 8: mod_base = OTHER; note = 2'-O-methyladenosine-3'-phosphate
  modified_base 9: mod_base = OTHER; note = 2'-deoxy-2'-fluorocytidine-3'-phosphate
  modified_base 10: mod_base = OTHER; note = 2'-deoxy-2'-fluorouridine-3'-phosphate
  modified_base 11: mod_base = OTHER; note = 2'-deoxy-2'-fluorocytidine-3'-phosphate
  modified_base 12: mod_base = OTHER; note = 2'-O-methyladenosine-3'-phosphate
  modified_base 13: mod_base = OTHER; note = 2'-O-methyladenosine-3'-phosphate
  modified_base 14: mod_base = OTHER; note = 2'-O-methyluridine-3'-phosphate
  modified_base 15: mod_base = OTHER; note = 2'-O-methyladenosine-3'-phosphate
  modified_base 16: mod_base = OTHER; note = 2'-O-methyladenosine-3'-phosphate
  modified_base 17: mod_base = OTHER; note = 2'-O-methyladenosine-3'-phosphate
  modified_base 18: mod_base = OTHER; note = 2'-O-methylguanosine-3'-phosphate
  modified_base 19: mod_base = OTHER; note = 2'-O-methyluridine-3'-phosphate
  modified_base 20: mod_base = OTHER; note = 2'-O-methylguanosine-3'-phosphate
  modified_base 21: mod_base = OTHER; note = 2'-O-methyladenosine-3'-phosphate ((2S,4R)-1-[29-[[2-(acetylamino)-2-deoxy-beta-D-galactopyra nosyl]oxy]-14,14-bis[[3-[[3-[[5-[[2-(acetylamino)-2-deoxy-b eta-D-galactopyranosyl]oxy]-1-oxopentyl]amino]propyl]amino] -3-oxopropoxy]methyl]-1,12,19,25-tetraoxo-16-oxa-13,20,24-t riazanonacos-1-yl]-4-hydroxy-2-pyrrolidinyl)methyl ester
cacagaaactcaataaagtga

SEQ ID NO: 112 - RNA, 23 nt, synthetic construct
  source 1..23: mol_type = other RNA
  modified_base 1: mod_base = OTHER; note = 2'-O-methyluridine-3'-phosphorothioate
  modified_base 2: mod_base = OTHER; note = 2'-deoxy-2'-fluorocytidine-3'-phosphorothioate
  modified_base 3: mod_base = OTHER; note = 2'-O-methyladenosine-3'-phosphate
  modified_base 4: mod_base = OTHER; note = 2'-O-methylcytidine-3'-phosphate
  modified_base 5: mod_base = OTHER; note = 2'-O-methyluridine-3'-phosphate
  modified_base 6: mod_base = OTHER; note = 2'-deoxy-2'-fluorouridine-3'-phosphate
  modified_base 7: mod_base = OTHER; note = 2'-O-methyluridine-3'-phosphate
  modified_base 8: mod_base = OTHER; note = 2'-deoxy-2'-fluoroadenosine-3'-phosphate
  modified_base 9: mod_base = OTHER; note = 2'-deoxy-2'-fluorouridine-3'-phosphate
  modified_base 10: mod_base = OTHER; note = 2'-O-methyluridine-3'-phosphate
  modified_base 11: mod_base = OTHER; note = 2'-O-methylguanosine-3'-phosphate
  modified_base 12: mod_base = OTHER; note = 2'-O-methyladenosine-3'-phosphate
  modified_base 13: mod_base = OTHER; note = 2'-O-methylguanosine-3'-phosphate
  modified_base 14: mod_base = OTHER; note = 2'-deoxy-2'-fluorouridine-3'-phosphate
  modified_base 15: mod_base = OTHER; note = 2'-O-methyluridine-3'-phosphate
  modified_base 16: mod_base = OTHER; note = 2'-deoxy-2'-fluorouridine-3'-phosphate
  modified_base 17: mod_base = OTHER; note = 2'-O-methylcytidine-3'-phosphate
  modified_base 18: mod_base = OTHER; note = 2'-O-methyluridine-3'-phosphate
  modified_base 19: mod_base = OTHER; note = 2'-O-methylguanosine-3'-phosphate
  modified_base 20: mod_base = OTHER; note = 2'-O-methyluridine-3'-phosphate
  modified_base 21: mod_base = OTHER; note = 2'-O-methylguanosine-3'-phosphorothioate
  modified_base 22: mod_base = OTHER; note = 2'-O-methylcytidine-3'-phosphorothioate
  modified_base 23: mod_base = OTHER; note = 2'-O-methylcytidine
tcactttattgagtttctgtgcc

SEQ ID NO: 113 - RNA, 21 nt, synthetic construct
  source 1..21: mol_type = other RNA
  modified_base 1: mod_base = OTHER; note = 2'-O-methylcytidine-3'-phosphorothioate
  modified_base 2: mod_base = OTHER; note = 2'-O-methyladenosine-3'-phosphorothioate
  modified_base 3: mod_base = OTHER; note = 2'-O-methylcytidine-3'-phosphate
  modified_base 4: mod_base = OTHER; note = 2'-O-methyladenosine-3'-phosphate
  modified_base 5: mod_base = OTHER; note = 2'-O-methylguanosine-3'-phosphate
  modified_base 6: mod_base = OTHER; note = 2'-O-methyladenosine-3'-phosphate
  modified_base 7: mod_base = OTHER; note = 2'-deoxy-2'-fluoroadenosine-3'-phosphate
  modified_base 8: mod_base = OTHER; note = 2'-O-methyladenosine-3'-phosphate
  modified_base 9: mod_base = OTHER; note = 2'-deoxy-2'-fluorocytidine-3'-phosphate
  modified_base 10: mod_base = OTHER; note = 2'-deoxy-2'-fluorouridine-3'-phosphate
  modified_base 11: mod_base = OTHER; note = 2'-deoxy-2'-fluorocytidine-3'-phosphate
  modified_base 12: mod_base = OTHER; note = 2'-O-methyladenosine-3'-phosphate
  modified_base 13: mod_base = OTHER; note = 2'-O-methyladenosine-3'-phosphate
  modified_base 14: mod_base = OTHER; note = 2'-O-methyluridine-3'-phosphate
  modified_base 15: mod_base = OTHER; note = 2'-O-methyladenosine-3'-phosphate
  modified_base 16: mod_base = OTHER; note = 2'-O-methyladenosine-3'-phosphate
  modified_base 17: mod_base = OTHER; note = 2'-O-methyladenosine-3'-phosphate
  modified_base 18: mod_base = OTHER; note = 2'-O-methylguanosine-3'-phosphate
  modified_base 19: mod_base = OTHER; note = 2'-O-methyluridine-3'-phosphate
  modified_base 20: mod_base = OTHER; note = 2'-O-methylguanosine-3'-phosphate
  modified_base 21: mod_base = OTHER; note = 2'-O-methyladenosine-3'-phosphate ((2S,4R)-1-[29-[[2-(acetylamino)-2-deoxy-beta-D-galactopyra nosyl]oxy]-14,14-bis[[3-[[3-[[5-[[2-(acetylamino)-2-deoxy-b eta-D-galactopyranosyl]oxy]-1-oxopentyl]amino]propyl]amino] -3-oxopropoxy]methyl]-1,12,19,25-tetraoxo-16-oxa-13,20,24-t riazanonacos-1-yl]-4-hydroxy-2-pyrrolidinyl)methyl ester
cacagaaactcaataaagtga

SEQ ID NO: 114 - RNA, 23 nt, synthetic construct
  source 1..23: mol_type = other RNA
  modified_base 1: mod_base = OTHER; note = 2'-O-methyluridine-3'-phosphorothioate 5'-(E)-Vinylphosphonate
  modified_base 2: mod_base = OTHER; note = 2'-deoxy-2'-fluorocytidine-3'-phosphorothioate
  modified_base 3: mod_base = OTHER; note = 2'-O-methyladenosine-3'-phosphate
  modified_base 4: mod_base = OTHER; note = 2'-O-methylcytidine-3'-phosphate
  modified_base 5: mod_base = OTHER; note = 2'-O-methyluridine-3'-phosphate
  modified_base 6: mod_base = OTHER; note = 2'-deoxy-2'-fluorouridine-3'-phosphate
  modified_base 7: mod_base = OTHER; note = 2'-O-methyluridine-3'-phosphate
  modified_base 8: mod_base = OTHER; note = 2'-deoxy-2'-fluoroadenosine-3'-phosphate
  modified_base 9: mod_base = OTHER; note = 2'-deoxy-2'-fluorouridine-3'-phosphate
  modified_base 10: mod_base = OTHER; note = 2'-O-methyluridine-3'-phosphate
  modified_base 11: mod_base = OTHER; note = 2'-O-methylguanosine-3'-phosphate
  modified_base 12: mod_base = OTHER; note = 2'-O-methyladenosine-3'-phosphate
  modified_base 13: mod_base = OTHER; note = 2'-O-methylguanosine-3'-phosphate
  modified_base 14: mod_base = OTHER; note = 2'-deoxy-2'-fluorouridine-3'-phosphate
  modified_base 15: mod_base = OTHER; note = 2'-O-methyluridine-3'-phosphate
  modified_base 16: mod_base = OTHER; note = 2'-deoxy-2'-fluorouridine-3'-phosphate
  modified_base 17: mod_base = OTHER; note = 2'-O-methylcytidine-3'-phosphate
  modified_base 18: mod_base = OTHER; note = 2'-O-methyluridine-3'-phosphate
  modified_base 19: mod_base = OTHER; note = 2'-O-methylguanosine-3'-phosphate
  modified_base 20: mod_base = OTHER; note = 2'-O-methyluridine-3'-phosphate
  modified_base 21: mod_base = OTHER; note = 2'-O-methylguanosine-3'-phosphorothioate
  modified_base 22: mod_base = OTHER; note = 2'-O-methylcytidine-3'-phosphorothioate
  modified_base 23: mod_base = OTHER; note = 2'-O-methylcytidine
tcactttattgagtttctgtgcc

SEQ ID NO: 115 - RNA, 21 nt, synthetic construct
  source 1..21: mol_type = other RNA
  modified_base 1: mod_base = OTHER; note = 2'-O-methylcytidine-3'-phosphorothioate
  modified_base 2: mod_base = OTHER; note = 2'-O-methyladenosine-3'-phosphorothioate
  modified_base 3: mod_base = OTHER; note = 2'-O-methylcytidine-3'-phosphate
  modified_base 4: mod_base = OTHER; note = 2'-O-methyladenosine-3'-phosphate
  modified_base 5: mod_base = OTHER; note = 2'-O-methylguanosine-3'-phosphate
  modified_base 6: mod_base = OTHER; note = 2'-O-methyladenosine-3'-phosphate
  modified_base 7: mod_base = OTHER; note = 2'-deoxy-2'-fluoroadenosine-3'-phosphate
  modified_base 8: mod_base = OTHER; note = 2'-O-methyladenosine-3'-phosphate
  modified_base 9: mod_base = OTHER; note = 2'-deoxy-2'-fluorocytidine-3'-phosphate
  modified_base 10: mod_base = OTHER; note = 2'-deoxy-2'-fluorouridine-3'-phosphate
  modified_base 11: mod_base = OTHER; note = 2'-deoxy-2'-fluorocytidine-3'-phosphate
  modified_base 12: mod_base = OTHER; note = 2'-O-methyladenosine-3'-phosphate
  modified_base 13: mod_base = OTHER; note = 2'-O-methyladenosine-3'-phosphate
  modified_base 14: mod_base = OTHER; note = 2'-O-methyluridine-3'-phosphate
  modified_base 15: mod_base = OTHER; note = 2'-O-methyladenosine-3'-phosphate
  modified_base 16: mod_base = OTHER; note = 2'-O-methyladenosine-3'-phosphate
  modified_base 17: mod_base = OTHER; note = 2'-O-methyladenosine-3'-phosphate
  modified_base 18: mod_base = OTHER; note = 2'-O-methylguanosine-3'-phosphate
  modified_base 19: mod_base = OTHER; note = 2'-O-methyluridine-3'-phosphate
  modified_base 20: mod_base = OTHER; note = 2'-O-methylguanosine-3'-phosphate
  modified_base 21: mod_base = OTHER; note = 2'-O-methyladenosine-3'-phosphate ((2S,4R)-1-[29-[[2-(acetylamino)-2-deoxy-beta-D-galactopyra nosyl]oxy]-14,14-bis[[3-[[3-[[5-[[2-(acetylamino)-2-deoxy-b eta-D-galactopyranosyl]oxy]-1-oxopentyl]amino]propyl]amino] -3-oxopropoxy]methyl]-1,12,19,25-tetraoxo-16-oxa-13,20,24-t riazanonacos-1-yl]-4-hydroxy-2-pyrrolidinyl)methyl ester
cacagaaactcaataaagtga

SEQ ID NO: 116 - RNA, 23 nt, synthetic construct
  source 1..23: mol_type = other RNA
  modified_base 1: mod_base = OTHER; note = 2'-O-methyluridine-3'-phosphate 5'-(E)-Vinylphosphonate
  modified_base 2: mod_base = OTHER; note = 2'-deoxy-2'-fluorocytidine-3'-phosphate
  modified_base 3: mod_base = OTHER; note = 2'-O-methyladenosine-3'-phosphate
  modified_base 4: mod_base = OTHER; note = 2'-O-methylcytidine-3'-phosphate
  modified_base 5: mod_base = OTHER; note = 2'-O-methyluridine-3'-phosphate
  modified_base 6: mod_base = OTHER; note = 2'-deoxy-2'-fluorouridine-3'-phosphate
  modified_base 7: mod_base = OTHER; note = 2'-O-methyluridine-3'-phosphate
  modified_base 8: mod_base = OTHER; note = 2'-deoxy-2'-fluoroadenosine-3'-phosphate
  modified_base 9: mod_base = OTHER; note = 2'-deoxy-2'-fluorouridine-3'-phosphate
  modified_base 10: mod_base = OTHER; note = 2'-O-methyluridine-3'-phosphate
  modified_base 11: mod_base = OTHER; note = 2'-O-methylguanosine-3'-phosphate
  modified_base 12: mod_base = OTHER; note = 2'-O-methyladenosine-3'-phosphate
  modified_base 13: mod_base = OTHER; note = 2'-O-methylguanosine-3'-phosphate
  modified_base 14: mod_base = OTHER; note = 2'-deoxy-2'-fluorouridine-3'-phosphate
  modified_base 15: mod_base = OTHER; note = 2'-O-methyluridine-3'-phosphate
  modified_base 16: mod_base = OTHER; note = 2'-deoxy-2'-fluorouridine-3'-phosphate
  modified_base 17: mod_base = OTHER; note = 2'-O-methylcytidine-3'-phosphate
  modified_base 18: mod_base = OTHER; note = 2'-O-methyluridine-3'-phosphate
  modified_base 19: mod_base = OTHER; note = 2'-O-methylguanosine-3'-phosphate
  modified_base 20: mod_base = OTHER; note = 2'-O-methyluridine-3'-phosphate
  modified_base 21: mod_base = OTHER; note = 2'-O-methylguanosine-3'-phosphorothioate
  modified_base 22: mod_base = OTHER; note = 2'-O-methylcytidine-3'-phosphorothioate
  modified_base 23: mod_base = OTHER; note = 2'-O-methylcytidine
tcactttattgagtttctgtgcc

SEQ ID NO: 117 - RNA, 21 nt, synthetic construct
  source 1..21: mol_type = other RNA
  modified_base 1: mod_base = OTHER; note = 2'-O-methylcytidine-3'-phosphorothioate
  modified_base 2: mod_base = OTHER; note = 2'-O-methyladenosine-3'-phosphorothioate
  modified_base 3: mod_base = OTHER; note = 2'-O-methylcytidine-3'-phosphate
  modified_base 4: mod_base = OTHER; note = 2'-O-methyladenosine-3'-phosphate
  modified_base 5: mod_base = OTHER; note = 2'-O-methylguanosine-3'-phosphate
  modified_base 6: mod_base = OTHER; note = 2'-O-methyladenosine-3'-phosphate
  modified_base 7: mod_base = OTHER; note = 2'-deoxy-2'-fluoroadenosine-3'-phosphate
  modified_base 8: mod_base = OTHER; note = 2'-O-methyladenosine-3'-phosphate
  modified_base 9: mod_base = OTHER; note = 2'-deoxy-2'-fluorocytidine-3'-phosphate
  modified_base 10: mod_base = OTHER; note = 2'-deoxy-2'-fluorouridine-3'-phosphate
  modified_base 11: mod_base = OTHER; note = 2'-deoxy-2'-fluorocytidine-3'-phosphate
  modified_base 12: mod_base = OTHER; note = 2'-O-methyladenosine-3'-phosphate
  modified_base 13: mod_base = OTHER; note = 2'-O-methyladenosine-3'-phosphate
  modified_base 14: mod_base = OTHER; note = 2'-O-methyluridine-3'-phosphate
  modified_base 15: mod_base = OTHER; note = 2'-O-methyladenosine-3'-phosphate
  modified_base 16: mod_base = OTHER; note = 2'-O-methyladenosine-3'-phosphate
  modified_base 17: mod_base = OTHER; note = 2'-O-methyladenosine-3'-phosphate
  modified_base 18: mod_base = OTHER; note = 2'-O-methylguanosine-3'-phosphate
  modified_base 19: mod_base = OTHER; note = 2'-O-methyluridine-3'-phosphate
  modified_base 20: mod_base = OTHER; note = 2'-O-methylguanosine-3'-phosphate
  modified_base 21: mod_base = OTHER; note = 2'-O-methyladenosine-3'-phosphate ((2S,4R)-1-[29-[[2-(acetylamino)-2-deoxy-beta-D-galactopyra nosyl]oxy]-14,14-bis[[3-[[3-[[5-[[2-(acetylamino)-2-deoxy-b eta-D-galactopyranosyl]oxy]-1-oxopentyl]amino]propyl]amino] -3-oxopropoxy]methyl]-1,12,19,25-tetraoxo-16-oxa-13,20,24-t riazanonacos-1-yl]-4-hydroxy-2-pyrrolidinyl)methyl ester
cacagaaactcaataaagtga

SEQ ID NO: 118 - RNA, 23 nt, synthetic construct
  source 1..23: mol_type = other RNA
  modified_base 1: mod_base = OTHER; note = 2'-O-methyluridine-3'-phosphate
  modified_base 2: mod_base = OTHER; note = 2'-deoxy-2'-fluorocytidine-3'-phosphate
  modified_base 3: mod_base = OTHER; note = 2'-O-methyladenosine-3'-phosphate
  modified_base 4: mod_base = OTHER; note = 2'-O-methylcytidine-3'-phosphate
  modified_base 5: mod_base = OTHER; note = 2'-O-methyluridine-3'-phosphate
  modified_base 6: mod_base = OTHER; note = 2'-deoxy-2'-fluorouridine-3'-phosphate
  modified_base 7: mod_base = OTHER; note = 2'-O-methyluridine-3'-phosphate
  modified_base 8: mod_base = OTHER; note = 2'-deoxy-2'-fluoroadenosine-3'-phosphate
  modified_base 9: mod_base = OTHER; note = 2'-deoxy-2'-fluorouridine-3'-phosphate
  modified_base 10: mod_base = OTHER; note = 2'-O-methyluridine-3'-phosphate
  modified_base 11: mod_base = OTHER; note = 2'-O-methylguanosine-3'-phosphate
  modified_base 12: mod_base = OTHER; note = 2'-O-methyladenosine-3'-phosphate
  modified_base 13: mod_base = OTHER; note = 2'-O-methylguanosine-3'-phosphate
  modified_base 14: mod_base = OTHER; note = 2'-deoxy-2'-fluorouridine-3'-phosphate
  modified_base 15: mod_base = OTHER; note = 2'-O-methyluridine-3'-phosphate
  modified_base 16: mod_base = OTHER; note = 2'-deoxy-2'-fluorouridine-3'-phosphate
  modified_base 17: mod_base = OTHER; note = 2'-O-methylcytidine-3'-phosphate
  modified_base 18: mod_base = OTHER; note = 2'-O-methyluridine-3'-phosphate
  modified_base 19: mod_base = OTHER; note = 2'-O-methylguanosine-3'-phosphate
  modified_base 20: mod_base = OTHER; note = 2'-O-methyluridine-3'-phosphate
  modified_base 21: mod_base = OTHER; note = 2'-O-methylguanosine-3'-phosphorothioate
  modified_base 22: mod_base = OTHER; note = 2'-O-methylcytidine-3'-phosphorothioate
  modified_base 23: mod_base = OTHER; note = 2'-O-methylcytidine
tcactttattgagtttctgtgcc

SEQ ID NO: 119 - RNA, 21 nt, synthetic construct
  source 1..21: mol_type = other RNA
  modified_base 1: mod_base = OTHER; note = 2'-O-methylcytidine-3'-phosphorothioate
  modified_base 2: mod_base = OTHER; note = 2'-O-methyladenosine-3'-phosphorothioate
  modified_base 3: mod_base = OTHER; note = 2'-O-methylcytidine-3'-phosphate
  modified_base 4: mod_base = OTHER; note = 2'-O-methyladenosine-3'-phosphate
  modified_base 5: mod_base = OTHER; note = 2'-O-methylguanosine-3'-phosphate
  modified_base 6: mod_base = OTHER; note = 2'-O-methyladenosine-3'-phosphate
  modified_base 7: mod_base = OTHER; note = 2'-deoxy-2'-fluoroadenosine-3'-phosphate
  modified_base 8: mod_base = OTHER; note = 2'-O-methyladenosine-3'-phosphate
  modified_base 9: mod_base = OTHER; note = 2'-deoxy-2'-fluorocytidine-3'-phosphate
  modified_base 10: mod_base = OTHER; note = 2'-deoxy-2'-fluorouridine-3'-phosphate
  modified_base 11: mod_base = OTHER; note = 2'-deoxy-2'-fluorocytidine-3'-phosphate
  modified_base 12: mod_base = OTHER; note = 2'-O-methyladenosine-3'-phosphate
  modified_base 13: mod_base = OTHER; note = 2'-O-methyladenosine-3'-phosphate
  modified_base 14: mod_base = OTHER; note = 2'-O-methyluridine-3'-phosphate
  modified_base 15: mod_base = OTHER; note = 2'-O-methyladenosine-3'-phosphate
  modified_base 16: mod_base = OTHER; note = 2'-O-methyladenosine-3'-phosphate
  modified_base 17: mod_base = OTHER; note = 2'-O-methyladenosine-3'-phosphate
  modified_base 18: mod_base = OTHER; note = 2'-O-methylguanosine-3'-phosphate
  modified_base 19: mod_base = OTHER; note = 2'-O-methyluridine-3'-phosphate
  modified_base 20: mod_base = OTHER; note = 2'-O-methylguanosine-3'-phosphate
  modified_base 21: mod_base = OTHER; note = 2'-O-methyladenosine-3'-phosphate ((2S,4R)-1-[29-[[2-(acetylamino)-2-deoxy-beta-D-galactopyra nosyl]oxy]-14,14-bis[[3-[[3-[[5-[[2-(acetylamino)-2-deoxy-b eta-D-galactopyranosyl]oxy]-1-oxopentyl]amino]propyl]amino] -3-oxopropoxy]methyl]-1,12,19,25-tetraoxo-16-oxa-13,20,24-t riazanonacos-1-yl]-4-hydroxy-2-pyrrolidinyl)methyl ester
cacagaaactcaataaagtga

SEQ ID NO: 120 - RNA, 23 nt, synthetic construct
  source 1..23: mol_type = other RNA
  modified_base 1: mod_base = OTHER; note = 2'-O-methyluridine-3'-phosphorothioate 5'-(trans-5-methoxy-1,2-dithian-4-yl phosphate)
  modified_base 2: mod_base = OTHER; note = 2'-deoxy-2'-fluorocytidine-3'-phosphorothioate
  modified_base 3: mod_base = OTHER; note = 2'-O-methyladenosine-3'-phosphate
  modified_base 4: mod_base = OTHER; note = 2'-O-methylcytidine-3'-phosphate
  modified_base 5: mod_base = OTHER; note = 2'-O-methyluridine-3'-phosphate
  modified_base 6: mod_base = OTHER; note = 2'-deoxy-2'-fluorouridine-3'-phosphate
  modified_base 7: mod_base = OTHER; note = 2'-O-methyluridine-3'-phosphate
  modified_base 8: mod_base = OTHER; note = 2'-deoxy-2'-fluoroadenosine-3'-phosphate
  modified_base 9: mod_base = OTHER; note = 2'-deoxy-2'-fluorouridine-3'-phosphate
  modified_base 10: mod_base = OTHER; note = 2'-O-methyluridine-3'-phosphate
  modified_base 11: mod_base = OTHER; note = 2'-O-methylguanosine-3'-phosphate
  modified_base 12: mod_base = OTHER; note = 2'-O-methyladenosine-3'-phosphate
  modified_base 13: mod_base = OTHER; note = 2'-O-methylguanosine-3'-phosphate
  modified_base 14: mod_base = OTHER; note = 2'-deoxy-2'-fluorouridine-3'-phosphate
  modified_base 15: mod_base = OTHER; note = 2'-O-methyluridine-3'-phosphate
  modified_base 16: mod_base = OTHER; note = 2'-deoxy-2'-fluorouridine-3'-phosphate
  modified_base 17: mod_base = OTHER; note = 2'-O-methylcytidine-3'-phosphate
  modified_base 18: mod_base = OTHER; note = 2'-O-methyluridine-3'-phosphate
  modified_base 19: mod_base = OTHER; note = 2'-O-methylguanosine-3'-phosphate
  modified_base 20: mod_base = OTHER; note = 2'-O-methyluridine-3'-phosphate
  modified_base 21: mod_base = OTHER; note = 2'-O-methylguanosine-3'-phosphorothioate
  modified_base 22: mod_base = OTHER; note = 2'-O-methylcytidine-3'-phosphorothioate
  modified_base 23: mod_base = OTHER; note = 2'-O-methylcytidine
tcactttattgagtttctgtgcc

SEQ ID NO: 121 - RNA, 21 nt, synthetic construct
  source 1..21: mol_type = other RNA
  modified_base 1: mod_base = OTHER; note = 2'-O-methylcytidine-3'-phosphorothioate
  modified_base 2: mod_base = OTHER; note = 2'-O-methyladenosine-3'-phosphorothioate
  modified_base 3: mod_base = OTHER; note = 2'-O-methylcytidine-3'-phosphate
  modified_base 4: mod_base = OTHER; note = 2'-O-methyladenosine-3'-phosphate
  modified_base 5: mod_base = OTHER; note = 2'-O-methylguanosine-3'-phosphate
  modified_base 6: mod_base = OTHER; note = 2'-O-methyladenosine-3'-phosphate
  modified_base 7: mod_base = OTHER; note = 2'-deoxy-2'-fluoroadenosine-3'-phosphate
  modified_base 8: mod_base = OTHER; note = 2'-O-methyladenosine-3'-phosphate
  modified_base 9: mod_base = OTHER; note = 2'-deoxy-2'-fluorocytidine-3'-phosphate
  modified_base 10: mod_base = OTHER; note = 2'-deoxy-2'-fluorouridine-3'-phosphate
  modified_base 11: mod_base = OTHER; note = 2'-deoxy-2'-fluorocytidine-3'-phosphate
  modified_base 12: mod_base = OTHER; note = 2'-O-methyladenosine-3'-phosphate
  modified_base 13: mod_base = OTHER; note = 2'-O-methyladenosine-3'-phosphate
  modified_base 14: mod_base = OTHER; note = 2'-O-methyluridine-3'-phosphate
  modified_base 15: mod_base = OTHER; note = 2'-O-methyladenosine-3'-phosphate
  modified_base 16: mod_base = OTHER; note = 2'-O-methyladenosine-3'-phosphate
  modified_base 17: mod_base = OTHER; note = 2'-O-methyladenosine-3'-phosphate
  modified_base 18: mod_base = OTHER; note = 2'-O-methylguanosine-3'-phosphate
  modified_base 19: mod_base = OTHER; note = 2'-O-methyluridine-3'-phosphate
  modified_base 20: mod_base = OTHER; note = 2'-O-methylguanosine-3'-phosphate
  modified_base 21: mod_base = OTHER; note = 2'-O-methyladenosine-3'-phosphate ((2S,4R)-1-[29-[[2-(acetylamino)-2-deoxy-beta-D-galactopyra nosyl]oxy]-14,14-bis[[3-[[3-[[5-[[2-(acetylamino)-2-deoxy-b eta-D-galactopyranosyl]oxy]-1-oxopentyl]amino]propyl]amino] -3-oxopropoxy]methyl]-1,12,19,25-tetraoxo-16-oxa-13,20,24-t riazanonacos-1-yl]-4-hydroxy-2-pyrrolidinyl)methyl ester
cacagaaactcaataaagtga

SEQ ID NO: 122 - RNA, 23 nt, synthetic construct
  source 1..23: mol_type = other RNA
  modified_base 1: mod_base = OTHER; note = 2'-O-methyluridine-3'-phosphate 5'-(trans-5-methoxy-1,2-dithian-4-yl phosphate)
  modified_base 2: mod_base = OTHER; note = 2'-deoxy-2'-fluorocytidine-3'-phosphate
  modified_base 3: mod_base = OTHER; note = 2'-O-methyladenosine-3'-phosphate
  modified_base 4: mod_base = OTHER; note = 2'-O-methylcytidine-3'-phosphate
  modified_base 5: mod_base = OTHER; note = 2'-O-methyluridine-3'-phosphate
  modified_base 6: mod_base = OTHER; note = 2'-deoxy-2'-fluorouridine-3'-phosphate
  modified_base 7: mod_base = OTHER; note = 2'-O-methyluridine-3'-phosphate
  modified_base 8: mod_base = OTHER; note = 2'-deoxy-2'-fluoroadenosine-3'-phosphate
  modified_base 9: mod_base = OTHER; note = 2'-deoxy-2'-fluorouridine-3'-phosphate
  modified_base 10: mod_base = OTHER; note = 2'-O-methyluridine-3'-phosphate
  modified_base 11: mod_base = OTHER; note = 2'-O-methylguanosine-3'-phosphate
  modified_base 12: mod_base = OTHER; note = 2'-O-methyladenosine-3'-phosphate
  modified_base 13: mod_base = OTHER; note = 2'-O-methylguanosine-3'-phosphate
  modified_base 14: mod_base = OTHER; note = 2'-deoxy-2'-fluorouridine-3'-phosphate
  modified_base 15: mod_base = OTHER; note = 2'-O-methyluridine-3'-phosphate
  modified_base 16: mod_base = OTHER; note = 2'-deoxy-2'-fluorouridine-3'-phosphate
  modified_base 17: mod_base = OTHER; note = 2'-O-methylcytidine-3'-phosphate
  modified_base 18: mod_base = OTHER; note = 2'-O-methyluridine-3'-phosphate
  modified_base 19: mod_base = OTHER; note = 2'-O-methylguanosine-3'-phosphate
  modified_base 20: mod_base = OTHER; note = 2'-O-methyluridine-3'-phosphate
  modified_base 21: mod_base = OTHER; note = 2'-O-methylguanosine-3'-phosphorothioate
  modified_base 22: mod_base = OTHER; note = 2'-O-methylcytidine-3'-phosphorothioate
  modified_base 23: mod_base = OTHER; note = 2'-O-methylcytidine
tcactttattgagtttctgtgcc

SEQ ID NO: 123 - RNA, 21 nt, synthetic construct
  source 1..21: mol_type = other RNA
  modified_base 1: mod_base = OTHER; note = 2'-O-methylcytidine-3'-phosphorothioate
  modified_base 2: mod_base = OTHER; note = 2'-O-methyladenosine-3'-phosphorothioate
  modified_base 3: mod_base = OTHER; note = 2'-O-methylcytidine-3'-phosphate
  modified_base 4: mod_base = OTHER; note = 2'-O-methyladenosine-3'-phosphate
  modified_base 5: mod_base = OTHER; note = 2'-O-methylguanosine-3'-phosphate
  modified_base 6: mod_base = OTHER; note = 2'-O-methyladenosine-3'-phosphate
  modified_base 7: mod_base = OTHER; note = 2'-deoxy-2'-fluoroadenosine-3'-phosphate
  modified_base 8: mod_base = OTHER; note = 2'-O-methyladenosine-3'-phosphate
  modified_base 9: mod_base = OTHER; note = 2'-deoxy-2'-fluorocytidine-3'-phosphate
  modified_base 10: mod_base = OTHER; note = 2'-deoxy-2'-fluorouridine-3'-phosphate
  modified_base 11: mod_base = OTHER; note = 2'-deoxy-2'-fluorocytidine-3'-phosphate
  modified_base 12: mod_base = OTHER; note = 2'-O-methyladenosine-3'-phosphate
  modified_base 13: mod_base = OTHER; note = 2'-O-methyladenosine-3'-phosphate
  modified_base 14: mod_base = OTHER; note = 2'-O-methyluridine-3'-phosphate
  modified_base 15: mod_base = OTHER; note = 2'-O-methyladenosine-3'-phosphate
  modified_base 16: mod_base = OTHER; note = 2'-O-methyladenosine-3'-phosphate
  modified_base 17: mod_base = OTHER; note = 2'-O-methyladenosine-3'-phosphate
  modified_base 18: mod_base = OTHER; note = 2'-O-methylguanosine-3'-phosphate
  modified_base 19: mod_base = OTHER; note = 2'-O-methyluridine-3'-phosphate
  modified_base 20: mod_base = OTHER; note = 2'-O-methylguanosine-3'-phosphate
  modified_base 21: mod_base = OTHER; note = 2'-O-methyladenosine-3'-phosphate ((2S,4R)-1-[29-[[2-(acetylamino)-2-deoxy-beta-D-galactopyra nosyl]oxy]-14,14-bis[[3-[[3-[[5-[[2-(acetylamino)-2-deoxy-b eta-D-galactopyranosyl]oxy]-1-oxopentyl]amino]propyl]amino] -3-oxopropoxy]methyl]-1,12,19,25-tetraoxo-16-oxa-13,20,24-t riazanonacos-1-yl]-4-hydroxy-2-pyrrolidinyl)methyl ester
cacagaaactcaataaagtga

SEQ ID NO: 124 - RNA, 23 nt, synthetic construct
  source 1..23: mol_type = other RNA
  modified_base 1: mod_base = OTHER; note = 2'-O-methyluridine-3'-phosphorothioate 5'-(trans-5-methoxy-1,2-dithian-4-yl thiophosphate)
  modified_base 2: mod_base = OTHER; note = 2'-deoxy-2'-fluorocytidine-3'-phosphorothioate
  modified_base 3: mod_base = OTHER; note = 2'-O-methyladenosine-3'-phosphate
  modified_base 4: mod_base = OTHER; note = 2'-O-methylcytidine-3'-phosphate
  modified_base 5: mod_base = OTHER; note = 2'-O-methyluridine-3'-phosphate
  modified_base 6: mod_base = OTHER; note = 2'-deoxy-2'-fluorouridine-3'-phosphate
  modified_base 7: mod_base = OTHER; note = 2'-O-methyluridine-3'-phosphate
  modified_base 8: mod_base = OTHER; note = 2'-deoxy-2'-fluoroadenosine-3'-phosphate
  modified_base 9: mod_base = OTHER; note = 2'-deoxy-2'-fluorouridine-3'-phosphate
  modified_base 10: mod_base = OTHER; note = 2'-O-methyluridine-3'-phosphate
  modified_base 11: mod_base = OTHER; note = 2'-O-methylguanosine-3'-phosphate
  modified_base 12: mod_base = OTHER; note = 2'-O-methyladenosine-3'-phosphate
  modified_base 13: mod_base = OTHER; note = 2'-O-methylguanosine-3'-phosphate
  modified_base 14: mod_base = OTHER; note = 2'-deoxy-2'-fluorouridine-3'-phosphate
  modified_base 15: mod_base = OTHER; note = 2'-O-methyluridine-3'-phosphate
  modified_base 16: mod_base = OTHER; note = 2'-deoxy-2'-fluorouridine-3'-phosphate
  modified_base 17: mod_base = OTHER; note = 2'-O-methylcytidine-3'-phosphate
  modified_base 18: mod_base = OTHER; note = 2'-O-methyluridine-3'-phosphate
  modified_base 19: mod_base = OTHER; note = 2'-O-methylguanosine-3'-phosphate
  modified_base 20: mod_base = OTHER; note = 2'-O-methyluridine-3'-phosphate
  modified_base 21: mod_base = OTHER; note = 2'-O-methylguanosine-3'-phosphorothioate
  modified_base 22: mod_base = OTHER; note = 2'-O-methylcytidine-3'-phosphorothioate
  modified_base 23: mod_base = OTHER; note = 2'-O-methylcytidine
tcactttattgagtttctgtgcc

SEQ ID NO: 125 - RNA, 21 nt, synthetic construct
  source 1..21: mol_type = other RNA
  modified_base 1: mod_base = OTHER; note = 2'-O-methylcytidine-3'-phosphorothioate
  modified_base 2: mod_base = OTHER; note = 2'-O-methyladenosine-3'-phosphorothioate
  modified_base 3: mod_base = OTHER; note = 2'-O-methylcytidine-3'-phosphate
  modified_base 4: mod_base = OTHER; note = 2'-O-methyladenosine-3'-phosphate
  modified_base 5: mod_base = OTHER; note = 2'-O-methylguanosine-3'-phosphate
  modified_base 6: mod_base = OTHER; note = 2'-O-methyladenosine-3'-phosphate
  modified_base 7: mod_base = OTHER; note = 2'-deoxy-2'-fluoroadenosine-3'-phosphate
  modified_base 8: mod_base = OTHER; note = 2'-O-methyladenosine-3'-phosphate
  modified_base 9: mod_base = OTHER; note = 2'-deoxy-2'-fluorocytidine-3'-phosphate
  modified_base 10: mod_base = OTHER; note = 2'-deoxy-2'-fluorouridine-3'-phosphate
  modified_base 11: mod_base = OTHER; note = 2'-deoxy-2'-fluorocytidine-3'-phosphate
  modified_base 12: mod_base = OTHER; note = 2'-O-methyladenosine-3'-phosphate
  modified_base 13: mod_base = OTHER; note = 2'-O-methyladenosine-3'-phosphate
  modified_base 14: mod_base = OTHER; note = 2'-O-methyluridine-3'-phosphate
  modified_base 15: mod_base = OTHER; note = 2'-O-methyladenosine-3'-phosphate
  modified_base 16: mod_base = OTHER; note = 2'-O-methyladenosine-3'-phosphate
  modified_base 17: mod_base = OTHER; note = 2'-O-methyladenosine-3'-phosphate
  modified_base 18: mod_base = OTHER; note = 2'-O-methylguanosine-3'-phosphate
  modified_base 19: mod_base = OTHER; note = 2'-O-methyluridine-3'-phosphate
  modified_base 20: mod_base = OTHER; note = 2'-O-methylguanosine-3'-phosphate
  modified_base 21: mod_base = OTHER; note = 2'-O-methyladenosine-3'-phosphate ((2S,4R)-1-[29-[[2-(acetylamino)-2-deoxy-beta-D-galactopyra nosyl]oxy]-14,14-bis[[3-[[3-[[5-[[2-(acetylamino)-2-deoxy-b eta-D-galactopyranosyl]oxy]-1-oxopentyl]amino]propyl]amino] -3-oxopropoxy]methyl]-1,12,19,25-tetraoxo-16-oxa-13,20,24-t riazanonacos-1-yl]-4-hydroxy-2-pyrrolidinyl)methyl ester
cacagaaactcaataaagtga

SEQ ID NO: 126 - RNA, 23 nt, synthetic construct
  source 1..23: mol_type = other RNA
  modified_base 1: mod_base = OTHER; note = 2'-O-methyluridine-3'-phosphate 5'-(trans-5-methoxy-1,2-dithian-4-yl thiophosphate)
  modified_base 2: mod_base = OTHER; note = 2'-deoxy-2'-fluorocytidine-3'-phosphate
  modified_base 3: mod_base = OTHER; note = 2'-O-methyladenosine-3'-phosphate
  modified_base 4: mod_base = OTHER; note = 2'-O-methylcytidine-3'-phosphate
  modified_base 5: mod_base = OTHER; note = 2'-O-methyluridine-3'-phosphate
  modified_base 6: mod_base = OTHER; note = 2'-deoxy-2'-fluorouridine-3'-phosphate
  modified_base 7: mod_base = OTHER; note = 2'-O-methyluridine-3'-phosphate
  modified_base 8: mod_base = OTHER; note = 2'-deoxy-2'-fluoroadenosine-3'-phosphate
  modified_base 9: mod_base = OTHER; note = 2'-deoxy-2'-fluorouridine-3'-phosphate
  modified_base 10: mod_base = OTHER; note = 2'-O-methyluridine-3'-phosphate
  modified_base 11: mod_base = OTHER; note = 2'-O-methylguanosine-3'-phosphate
  modified_base 12: mod_base = OTHER; note = 2'-O-methyladenosine-3'-phosphate
  modified_base 13: mod_base = OTHER; note = 2'-O-methylguanosine-3'-phosphate
  modified_base 14: mod_base = OTHER; note = 2'-deoxy-2'-fluorouridine-3'-phosphate
  modified_base 15: mod_base = OTHER; note = 2'-O-methyluridine-3'-phosphate
  modified_base 16: mod_base = OTHER; note = 2'-deoxy-2'-fluorouridine-3'-phosphate
  modified_base 17: mod_base = OTHER; note = 2'-O-methylcytidine-3'-phosphate
  modified_base 18: mod_base = OTHER; note = 2'-O-methyluridine-3'-phosphate
  modified_base 19: mod_base = OTHER; note = 2'-O-methylguanosine-3'-phosphate
  modified_base 20: mod_base = OTHER; note = 2'-O-methyluridine-3'-phosphate
  modified_base 21: mod_base = OTHER; note = 2'-O-methylguanosine-3'-phosphorothioate
  modified_base 22: mod_base = OTHER; note = 2'-O-methylcytidine-3'-phosphorothioate
  modified_base 23: mod_base = OTHER; note = 2'-O-methylcytidine
tcactttattgagtttctgtgcc

SEQ ID NO: 127 - RNA, 21 nt, synthetic construct
  source 1..21: mol_type = other RNA
  modified_base 1: mod_base = OTHER; note = 2'-O-methylcytidine-3'-phosphorothioate
  modified_base 2: mod_base = OTHER; note = 2'-O-methyladenosine-3'-phosphorothioate
  modified_base 3: mod_base = OTHER; note = 2'-O-methylcytidine-3'-phosphate
  modified_base 4: mod_base = OTHER; note = 2'-O-methyladenosine-3'-phosphate
  modified_base 5: mod_base = OTHER; note = 2'-O-methylguanosine-3'-phosphate
  modified_base 6: mod_base = OTHER; note = 2'-O-methyladenosine-3'-phosphate
  modified_base 7: mod_base = OTHER; note = 2'-deoxy-2'-fluoroadenosine-3'-phosphate
  modified_base 8: mod_base = OTHER; note = 2'-O-methyladenosine-3'-phosphate
  modified_base 9: mod_base = OTHER; note = 2'-deoxy-2'-fluorocytidine-3'-phosphate
  modified_base 10: mod_base = OTHER; note = 2'-deoxy-2'-fluorouridine-3'-phosphate
  modified_base 11: mod_base = OTHER; note = 2'-deoxy-2'-fluorocytidine-3'-phosphate
  modified_base 12: mod_base = OTHER; note = 2'-O-methyladenosine-3'-phosphate
  modified_base 13: mod_base = OTHER; note = 2'-O-methyladenosine-3'-phosphate
  modified_base 14: mod_base = OTHER; note = 2'-O-methyluridine-3'-phosphate
  modified_base 15: mod_base = OTHER; note = 2'-O-methyladenosine-3'-phosphate
  modified_base 16: mod_base = OTHER; note = 2'-O-methyladenosine-3'-phosphate
  modified_base 17: mod_base = OTHER; note = 2'-O-methyladenosine-3'-phosphate
  modified_base 18: mod_base = OTHER; note = 2'-O-methylguanosine-3'-phosphate
  modified_base 19: mod_base = OTHER; note = 2'-O-methyluridine-3'-phosphate
  modified_base 20: mod_base = OTHER; note = 2'-O-methylguanosine-3'-phosphate
  modified_base 21: mod_base = OTHER; note = 2'-O-methyladenosine-3'-phosphate ((2S,4R)-1-[29-[[2-(acetylamino)-2-deoxy-beta-D-galactopyra nosyl]oxy]-14,14-bis[[3-[[3-[[5-[[2-(acetylamino)-2-deoxy-b eta-D-galactopyranosyl]oxy]-1-oxopentyl]amino]propyl]amino] -3-oxopropoxy]methyl]-1,12,19,25-tetraoxo-16-oxa-13,20,24-t riazanonacos-1-yl]-4-hydroxy-2-pyrrolidinyl)methyl ester
cacagaaactcaataaagtga

SEQ ID NO: 128 - RNA, 23 nt, synthetic construct
  source 1..23: mol_type = other RNA
  modified_base 1: mod_base = OTHER; note = 2'-O-methyluridine-3'-phosphorothioate
  modified_base 2: mod_base = OTHER; note = 2'-deoxy-2'-fluorocytidine-3'-phosphorothioate
  modified_base 3: mod_base = OTHER; note = 2'-O-methyladenosine-3'-phosphate
  modified_base 4: mod_base = OTHER; note = 2'-O-methylcytidine-3'-phosphate
  modified_base 5: mod_base = OTHER; note = 2'-O-methyluridine-3'-phosphate
  modified_base 6: mod_base = OTHER; note = 2'-deoxy-2'-fluorouridine-3'-phosphate
  modified_base 7: mod_base = OTHER; note = 2'-O-methyluridine-3'-phosphate
  modified_base 8: mod_base = OTHER; note = 2'-deoxy-2'-fluoroadenosine-3'-phosphate
  modified_base 9: mod_base = OTHER; note = 2'-deoxy-2'-fluorouridine-3'-phosphate
  modified_base 10: mod_base = OTHER; note = 2'-O-methyluridine-3'-phosphate
  modified_base 11: mod_base = OTHER; note = 2'-O-methylguanosine-3'-phosphate
  modified_base 12: mod_base = OTHER; note = 2'-O-methyladenosine-3'-phosphate
  modified_base 13: mod_base = OTHER; note = 2'-O-methylguanosine-3'-phosphate
  modified_base 14: mod_base = OTHER; note = 2'-deoxy-2'-fluorouridine-3'-phosphate
  modified_base 15: mod_base = OTHER; note = 2'-O-methyluridine-3'-phosphate
  modified_base 16: mod_base = OTHER; note = 2'-deoxy-2'-fluorouridine-3'-phosphate
  modified_base 17: mod_base = OTHER; note = 2'-O-methylcytidine-3'-phosphate
  modified_base 18: mod_base = OTHER; note = 2'-O-methyluridine-3'-phosphate
  modified_base 19: mod_base = OTHER; note = 2'-O-methylguanosine-3'-phosphate
  modified_base 20: mod_base = OTHER; note = 2'-O-methyluridine-3'-phosphate
  modified_base 21: mod_base = OTHER; note = 2'-O-methylguanosine-3'-phosphorothioate
  modified_base 22: mod_base = OTHER; note = 2'-O-methylcytidine-3'-phosphorothioate
  modified_base 23: mod_base = OTHER; note = 2'-O-methylcytidine
tcactttattgagtttctgtgcc

SEQ ID NO: 129 - RNA, 23 nt, synthetic construct
  source 1..23: mol_type = other RNA
  modified_base 1: mod_base = OTHER; note = 2'-O-methyluridine-3'-phosphate 5'-(E)-Vinylphosphonate
  modified_base 2: mod_base = OTHER; note = 2'-deoxy-2'-fluorocytidine-3'-phosphate
  modified_base 3: mod_base = OTHER; note = 2'-O-methyladenosine-3'-phosphate
  modified_base 4: mod_base = OTHER; note = 2'-O-methylcytidine-3'-phosphate
  modified_base 5: mod_base = OTHER; note = 2'-O-methyluridine-3'-phosphate
  modified_base 6: mod_base = OTHER; note = 2'-deoxy-2'-fluorouridine-3'-phosphate
  modified_base 7: mod_base = OTHER; note = 2'-O-methyluridine-3'-phosphate
  modified_base 8: mod_base = OTHER; note = 2'-deoxy-2'-fluoroadenosine-3'-phosphate
  modified_base 9: mod_base = OTHER; note = 2'-deoxy-2'-fluorouridine-3'-phosphate
  modified_base 10: mod_base = OTHER; note = 2'-O-methyluridine-3'-phosphate
  modified_base 11: mod_base = OTHER; note = 2'-O-methylguanosine-3'-phosphate
  modified_base 12: mod_base = OTHER; note = 2'-O-methyladenosine-3'-phosphate
  modified_base 13: mod_base = OTHER; note = 2'-O-methylguanosine-3'-phosphate
  modified_base 14: mod_base = OTHER; note = 2'-deoxy-2'-fluorouridine-3'-phosphate
  modified_base 15: mod_base = OTHER; note = 2'-O-methyluridine-3'-phosphate
  modified_base 16: mod_base = OTHER; note = 2'-deoxy-2'-fluorouridine-3'-phosphate
  modified_base 17: mod_base = OTHER; note = 2'-O-methylcytidine-3'-phosphate
  modified_base 18: mod_base = OTHER; note = 2'-O-methyluridine-3'-phosphate
  modified_base 19: mod_base = OTHER; note = 2'-O-methylguanosine-3'-phosphate
  modified_base 20: mod_base = OTHER; note = 2'-O-methyluridine-3'-phosphate
  modified_base 21: mod_base = OTHER; note = 2'-O-methylguanosine-3'-phosphorothioate
  modified_base 22: mod_base = OTHER; note = 2'-O-methylcytidine-3'-phosphorothioate
  modified_base 23: mod_base = OTHER; note = 2'-O-methylcytidine
tcactttattgagtttctgtgcc

SEQ ID NO: 130 - RNA, 23 nt, synthetic construct
  source 1..23: mol_type = other RNA
  modified_base 1: mod_base = OTHER; note = 2'-O-methyluridine-3'-phosphorothioate 5'-(cis-3,3,5-trimethyl-1,2-dithiolan-4-yl thiophosphate)
  modified_base 2: mod_base = OTHER; note = 2'-deoxy-2'-fluorocytidine-3'-phosphorothioate
  modified_base 3: mod_base = OTHER; note = 2'-O-methyladenosine-3'-phosphate
  modified_base 4: mod_base = OTHER; note = 2'-O-methylcytidine-3'-phosphate
  modified_base 5: mod_base = OTHER; note = 2'-O-methyluridine-3'-phosphate
  modified_base 6: mod_base = OTHER; note = 2'-deoxy-2'-fluorouridine-3'-phosphate
  modified_base 7: mod_base = OTHER; note = 2'-O-methyluridine-3'-phosphate
  modified_base 8: mod_base = OTHER; note = 2'-deoxy-2'-fluoroadenosine-3'-phosphate
  modified_base 9: mod_base = OTHER; note = 2'-deoxy-2'-fluorouridine-3'-phosphate
  modified_base 10: mod_base = OTHER; note = 2'-O-methyluridine-3'-phosphate
  modified_base 11: mod_base = OTHER; note = 2'-O-methylguanosine-3'-phosphate
  modified_base 12: mod_base = OTHER; note = 2'-O-methyladenosine-3'-phosphate
  modified_base 13: mod_base = OTHER; note = 2'-O-methylguanosine-3'-phosphate
  modified_base 14: mod_base = OTHER; note = 2'-deoxy-2'-fluorouridine-3'-phosphate
  modified_base 15: mod_base = OTHER; note = 2'-O-methyluridine-3'-phosphate
  modified_base 16: mod_base = OTHER; note = 2'-deoxy-2'-fluorouridine-3'-phosphate
  modified_base 17: mod_base = OTHER; note = 2'-O-methylcytidine-3'-phosphate
  modified_base 18: mod_base = OTHER; note = 2'-O-methyluridine-3'-phosphate
  modified_base 19: mod_base = OTHER; note = 2'-O-methylguanosine-3'-phosphate
  modified_base 20: mod_base = OTHER; note = 2'-O-methyluridine-3'-phosphate
  modified_base 21: mod_base = OTHER; note = 2'-O-methylguanosine-3'-phosphorothioate
  modified_base 22: mod_base = OTHER; note = 2'-O-methylcytidine-3'-phosphorothioate
  modified_base 23: mod_base = OTHER; note = 2'-O-methylcytidine
tcactttattgagtttctgtgcc

SEQ ID NO: 131 - RNA, 23 nt, synthetic construct
  source 1..23: mol_type = other RNA
  modified_base 1: mod_base = OTHER; note = 2'-O-methyluridine-3'-phosphate 5'-(cis-3,3,5-trimethyl-1,2-dithiolan-4-yl thiophosphate)
  modified_base 2: mod_base = OTHER; note = 2'-deoxy-2'-fluorocytidine-3'-phosphate
  modified_base 3: mod_base = OTHER; note = 2'-O-methyladenosine-3'-phosphate
  modified_base 4: mod_base = OTHER; note = 2'-O-methylcytidine-3'-phosphate
  modified_base 5: mod_base = OTHER; note = 2'-O-methyluridine-3'-phosphate
  modified_base 6: mod_base = OTHER; note = 2'-deoxy-2'-fluorouridine-3'-phosphate
  modified_base 7: mod_base = OTHER; note = 2'-O-methyluridine-3'-phosphate
  modified_base 8: mod_base = OTHER; note = 2'-deoxy-2'-fluoroadenosine-3'-phosphate
  modified_base 9: mod_base = OTHER; note = 2'-deoxy-2'-fluorouridine-3'-phosphate
  modified_base 10: mod_base = OTHER; note = 2'-O-methyluridine-3'-phosphate
  modified_base 11: mod_base = OTHER; note = 2'-O-methylguanosine-3'-phosphate
  modified_base 12: mod_base = OTHER; note = 2'-O-methyladenosine-3'-phosphate
  modified_base 13: mod_base = OTHER; note = 2'-O-methylguanosine-3'-phosphate
  modified_base 14: mod_base = OTHER; note = 2'-deoxy-2'-fluorouridine-3'-phosphate
  modified_base 15: mod_base = OTHER; note = 2'-O-methyluridine-3'-phosphate
  modified_base 16: mod_base = OTHER; note = 2'-deoxy-2'-fluorouridine-3'-phosphate
  modified_base 17: mod_base = OTHER; note = 2'-O-methylcytidine-3'-phosphate
  modified_base 18: mod_base = OTHER; note = 2'-O-methyluridine-3'-phosphate
  modified_base 19: mod_base = OTHER; note = 2'-O-methylguanosine-3'-phosphate
  modified_base 20: mod_base = OTHER; note = 2'-O-methyluridine-3'-phosphate
  modified_base 21: mod_base = OTHER; note = 2'-O-methylguanosine-3'-phosphorothioate
  modified_base 22: mod_base = OTHER; note = 2'-O-methylcytidine-3'-phosphorothioate
  modified_base 23: mod_base = OTHER; note = 2'-O-methylcytidine
tcactttattgagtttctgtgcc

SEQ ID NO: 132 - RNA, 21 nt, synthetic construct
  source 1..21: mol_type = other RNA
  modified_base 1: mod_base = OTHER; note = 2'-O-methylcytidine-3'-phosphorothioate
  modified_base 2: mod_base = OTHER; note = 2'-O-methyladenosine-3'-phosphorothioate
  modified_base 3: mod_base = OTHER; note = 2'-O-methylcytidine-3'-phosphate
  modified_base 4: mod_base = OTHER; note = 2'-O-methyladenosine-3'-phosphate
  modified_base 5: mod_base = OTHER; note = 2'-O-methylguanosine-3'-phosphate
  modified_base 6: mod_base = OTHER; note = 2'-O-methyladenosine-3'-phosphate
  modified_base 7: mod_base = OTHER; note = 2'-deoxy-2'-fluoroadenosine-3'-phosphate
  modified_base 8: mod_base = OTHER; note = 2'-O-methyladenosine-3'-phosphate
  modified_base 9: mod_base = OTHER; note = 2'-deoxy-2'-fluorocytidine-3'-phosphate
  modified_base 10: mod_base = OTHER; note = 2'-deoxy-2'-fluorouridine-3'-phosphate
  modified_base 11: mod_base = OTHER; note = 2'-deoxy-2'-fluorocytidine-3'-phosphate
  modified_base 12: mod_base = OTHER; note = 2'-O-methyladenosine-3'-phosphate
  modified_base 13: mod_base = OTHER; note = 2'-O-methyladenosine-3'-phosphate
  modified_base 14: mod_base = OTHER; note = 2'-O-methyluridine-3'-phosphate
  modified_base 15: mod_base = OTHER; note = 2'-O-methyladenosine-3'-phosphate
  modified_base 16: mod_base = OTHER; note = 2'-O-methyladenosine-3'-phosphate
  modified_base 17: mod_base = OTHER; note = 2'-O-methyladenosine-3'-phosphate
  modified_base 18: mod_base = OTHER; note = 2'-O-methylguanosine-3'-phosphate
  modified_base 19: mod_base = OTHER; note = 2'-O-methyluridine-3'-phosphate
  modified_base 20: mod_base = OTHER; note = 2'-O-methylguanosine-3'-phosphate
  modified_base 21: mod_base = OTHER; note = 2'-O-methyladenosine-3'-phosphate ((2S,4R)-1-[29-[[2-(acetylamino)-2-deoxy-beta-D-galactopyra nosyl]oxy]-14,14-bis[[3-[[3-[[5-[[2-(acetylamino)-2-deoxy-b eta-D-galactopyranosyl]oxy]-1-oxopentyl]amino]propyl]amino] -3-oxopropoxy]methyl]-1,12,19,25-tetraoxo-16-oxa-13,20,24-t riazanonacos-1-yl]-4-hydroxy-2-pyrrolidinyl)methyl ester
cacagaaactcaataaagtga

SEQ ID NO: 133 - RNA, 23 nt, synthetic construct
  source 1..23: mol_type = other RNA
  modified_base 1: mod_base = OTHER; note = 2'-O-methyluridine-3'-phosphate 5'-(trans-5-methoxy-1,2-dithian-4-yl thiophosphate)
  modified_base 2: mod_base = OTHER; note = 2'-deoxy-2'-fluorocytidine-3'-phosphate
  modified_base 3: mod_base = OTHER; note = 2'-O-methyladenosine-3'-phosphate
  modified_base 4: mod_base = OTHER; note = 2'-O-methylcytidine-3'-phosphate
  modified_base 5: mod_base = OTHER; note = 2'-O-methyluridine-3'-phosphate
  modified_base 6: mod_base = OTHER; note = 2'-deoxy-2'-fluorouridine-3'-phosphate
  modified_base 7: mod_base = OTHER; note = 2'-O-methyluridine-3'-phosphate
  modified_base 8: mod_base = OTHER; note = 2'-deoxy-2'-fluoroadenosine-3'-phosphate
  modified_base 9: mod_base = OTHER; note = 2'-deoxy-2'-fluorouridine-3'-phosphate
  modified_base 10: mod_base = OTHER; note = 2'-O-methyluridine-3'-phosphate
  modified_base 11: mod_base = OTHER; note = 2'-O-methylguanosine-3'-phosphate
  modified_base 12: mod_base = OTHER; note = 2'-O-methyladenosine-3'-phosphate
  modified_base 13: mod_base = OTHER; note = 2'-O-methylguanosine-3'-phosphate
  modified_base 14: mod_base = OTHER; note = 2'-deoxy-2'-fluorouridine-3'-phosphate
  modified_base 15: mod_base = OTHER; note = 2'-O-methyluridine-3'-phosphate
  modified_base 16: mod_base = OTHER; note = 2'-deoxy-2'-fluorouridine-3'-phosphate
  modified_base 17: mod_base = OTHER; note = 2'-O-methylcytidine-3'-phosphate
  modified_base 18: mod_base = OTHER; note = 2'-O-methyluridine-3'-phosphate
  modified_base 19: mod_base = OTHER; note = 2'-O-methylguanosine-3'-phosphate
  modified_base 20: mod_base = OTHER; note = 2'-O-methyluridine-3'-phosphate
  modified_base 21: mod_base = OTHER; note = 2'-O-methylguanosine-3'-phosphorothioate
  modified_base 22: mod_base = OTHER; note = 2'-O-methylcytidine-3'-phosphorothioate
  modified_base 23: mod_base = OTHER; note = 2'-O-methylcytidine
tcactttattgagtttctgtgcc

SEQ ID NO: 134 - RNA, 23 nt, synthetic construct
  source 1..23: mol_type = other RNA
  modified_base 1: mod_base = OTHER; note = 2'-O-methyluridine-3'-phosphorothioate 5'-(cis-3,3,5-trimethyl-1,2-dithiolan-4-yl thiophosphate)
  modified_base 2: mod_base = OTHER; note = 2'-deoxy-2'-fluorocytidine-3'-phosphorothioate
  modified_base 3: mod_base = OTHER; note = 2'-O-methyladenosine-3'-phosphate
  modified_base 4: mod_base = OTHER; note = 2'-O-methylcytidine-3'-phosphate
  modified_base 5: mod_base = OTHER; note = 2'-O-methyluridine-3'-phosphate
  modified_base 6: mod_base = OTHER; note = 2'-deoxy-2'-fluorouridine-3'-phosphate
  modified_base 7: mod_base = OTHER; note = 2'-O-methyluridine-3'-phosphate
  modified_base 8: mod_base = OTHER; note = 2'-deoxy-2'-fluoroadenosine-3'-phosphate
  modified_base 9: mod_base = OTHER; note = 2'-deoxy-2'-fluorouridine-3'-phosphate
  modified_base 10: mod_base = OTHER; note = 2'-O-methyluridine-3'-phosphate
  modified_base 11: mod_base = OTHER; note = 2'-O-methylguanosine-3'-phosphate
  modified_base 12: mod_base = OTHER; note = 2'-O-methyladenosine-3'-phosphate
  modified_base 13: mod_base = OTHER; note = 2'-O-methylguanosine-3'-phosphate
  modified_base 14: mod_base = OTHER; note = 2'-deoxy-2'-fluorouridine-3'-phosphate
  modified_base 15: mod_base = OTHER; note = 2'-O-methyluridine-3'-phosphate
  modified_base 16: mod_base = OTHER; note = 2'-deoxy-2'-fluorouridine-3'-phosphate
  modified_base 17: mod_base = OTHER; note = 2'-O-methylcytidine-3'-phosphate
  modified_base 18: mod_base = OTHER; note = 2'-O-methyluridine-3'-phosphate
  modified_base 19: mod_base = OTHER; note = 2'-O-methylguanosine-3'-phosphate
  modified_base 20: mod_base = OTHER; note = 2'-O-methyluridine-3'-phosphate
  modified_base 21: mod_base = OTHER; note = 2'-O-methylguanosine-3'-phosphorothioate
  modified_base 22: mod_base = OTHER; note = 2'-O-methylcytidine-3'-phosphorothioate
  modified_base 23: mod_base = OTHER; note = 2'-O-methylcytidine
tcactttattgagtttctgtgcc

SEQ ID NO: 135 - RNA, 23 nt, synthetic construct
  source 1..23: mol_type = other RNA
  modified_base 1: mod_base = OTHER; note = 2'-O-methyluridine-3'-phosphorothioate 5'-(trans-2-methoxycyclohex-1-yl thiophosphate)
  modified_base 2: mod_base = OTHER; note = 2'-deoxy-2'-fluorocytidine-3'-phosphorothioate
  modified_base 3: mod_base = OTHER; note = 2'-O-methyladenosine-3'-phosphate
  modified_base 4: mod_base = OTHER; note = 2'-O-methylcytidine-3'-phosphate
  modified_base 5: mod_base = OTHER; note = 2'-O-methyluridine-3'-phosphate
  modified_base 6: mod_base = OTHER; note = 2'-deoxy-2'-fluorouridine-3'-phosphate
  modified_base 7: mod_base = OTHER; note = 2'-O-methyluridine-3'-phosphate
  modified_base 8: mod_base = OTHER; note = 2'-deoxy-2'-fluoroadenosine-3'-phosphate
  modified_base 9: mod_base = OTHER; note = 2'-deoxy-2'-fluorouridine-3'-phosphate
  modified_base 10: mod_base = OTHER; note = 2'-O-methyluridine-3'-phosphate
  modified_base 11: mod_base = OTHER; note = 2'-O-methylguanosine-3'-phosphate
  modified_base 12: mod_base = OTHER; note = 2'-O-methyladenosine-3'-phosphate
  modified_base 13: mod_base = OTHER; note = 2'-O-methylguanosine-3'-phosphate
  modified_base 14: mod_base = OTHER; note = 2'-deoxy-2'-fluorouridine-3'-phosphate
  modified_base 15: mod_base = OTHER; note = 2'-O-methyluridine-3'-phosphate
  modified_base 16: mod_base = OTHER; note = 2'-deoxy-2'-fluorouridine-3'-phosphate
  modified_base 17: mod_base = OTHER; note = 2'-O-methylcytidine-3'-phosphate
  modified_base 18: mod_base = OTHER; note = 2'-O-methyluridine-3'-phosphate
  modified_base 19: mod_base = OTHER; note = 2'-O-methylguanosine-3'-phosphate
  modified_base 20: mod_base = OTHER; note = 2'-O-methyluridine-3'-phosphate
  modified_base 21: mod_base = OTHER; note = 2'-O-methylguanosine-3'-phosphorothioate
  modified_base 22: mod_base = OTHER; note = 2'-O-methylcytidine-3'-phosphorothioate
  modified_base 23: mod_base = OTHER; note = 2'-O-methylcytidine
tcactttattgagtttctgtgcc

SEQ ID NO: 136 - RNA, 23 nt, synthetic construct
  source 1..23: mol_type = other RNA
  modified_base 1: mod_base = OTHER; note = 2'-O-methyluridine-3'-phosphorothioate 5'-(trans-5-hydroxy-1,2-dithian-4-yl thiophosphate)
  modified_base 2: mod_base = OTHER; note = 2'-deoxy-2'-fluorocytidine-3'-phosphorothioate
  modified_base 3: mod_base = OTHER; note = 2'-O-methyladenosine-3'-phosphate
  modified_base 4: mod_base = OTHER; note = 2'-O-methylcytidine-3'-phosphate
  modified_base 5: mod_base = OTHER; note = 2'-O-methyluridine-3'-phosphate
  modified_base 6: mod_base = OTHER; note = 2'-deoxy-2'-fluorouridine-3'-phosphate
  modified_base 7: mod_base = OTHER; note = 2'-O-methyluridine-3'-phosphate
  modified_base 8: mod_base = OTHER; note = 2'-deoxy-2'-fluoroadenosine-3'-phosphate
  modified_base 9: mod_base = OTHER; note = 2'-deoxy-2'-fluorouridine-3'-phosphate
  modified_base 10: mod_base = OTHER; note = 2'-O-methyluridine-3'-phosphate
  modified_base 11: mod_base = OTHER; note = 2'-O-methylguanosine-3'-phosphate
  modified_base 12: mod_base = OTHER; note = 2'-O-methyladenosine-3'-phosphate
  modified_base 13: mod_base = OTHER; note = 2'-O-methylguanosine-3'-phosphate
  modified_base 14: mod_base = OTHER; note = 2'-deoxy-2'-fluorouridine-3'-phosphate
  modified_base 15: mod_base = OTHER; note = 2'-O-methyluridine-3'-phosphate
  modified_base 16: mod_base = OTHER; note = 2'-deoxy-2'-fluorouridine-3'-phosphate
  modified_base 17: mod_base = OTHER; note = 2'-O-methylcytidine-3'-phosphate
  modified_base 18: mod_base = OTHER; note = 2'-O-methyluridine-3'-phosphate
  modified_base 19: mod_base = OTHER; note = 2'-O-methylguanosine-3'-phosphate
  modified_base 20: mod_base = OTHER; note = 2'-O-methyluridine-3'-phosphate
  modified_base 21: mod_base = OTHER; note = 2'-O-methylguanosine-3'-phosphorothioate
  modified_base 22: mod_base = OTHER; note = 2'-O-methylcytidine-3'-phosphorothioate
  modified_base 23: mod_base = OTHER; note = 2'-O-methylcytidine
tcactttattgagtttctgtgcc

SEQ ID NO: 137 - RNA, 23 nt, synthetic construct
  source 1..23: mol_type = other RNA
  modified_base 1: mod_base = OTHER; note = 2'-O-methyluridine-3'-phosphorothioate 5'-(3,3,5,5-tetramethyl-1,2-dithiolan-4-yl thiophosphate)
  modified_base 2: mod_base = OTHER; note = 2'-deoxy-2'-fluorocytidine-3'-phosphorothioate
  modified_base 3: mod_base = OTHER; note = 2'-O-methyladenosine-3'-phosphate
  modified_base 4: mod_base = OTHER; note = 2'-O-methylcytidine-3'-phosphate
  modified_base 5: mod_base = OTHER; note = 2'-O-methyluridine-3'-phosphate
  modified_base 6: mod_base = OTHER; note = 2'-deoxy-2'-fluorouridine-3'-phosphate
  modified_base 7: mod_base = OTHER; note = 2'-O-methyluridine-3'-phosphate
  modified_base 8: mod_base = OTHER; note = 2'-deoxy-2'-fluoroadenosine-3'-phosphate
  modified_base 9: mod_base = OTHER; note = 2'-deoxy-2'-fluorouridine-3'-phosphate
  modified_base 10: mod_base = OTHER; note = 2'-O-methyluridine-3'-phosphate
  modified_base 11: mod_base = OTHER; note = 2'-O-methylguanosine-3'-phosphate
  modified_base 12: mod_base = OTHER; note = 2'-O-methyladenosine-3'-phosphate
  modified_base 13: mod_base = OTHER; note = 2'-O-methylguanosine-3'-phosphate
  modified_base 14: mod_base = OTHER; note = 2'-deoxy-2'-fluorouridine-3'-phosphate
  modified_base 15: mod_base = OTHER; note = 2'-O-methyluridine-3'-phosphate
  modified_base 16: mod_base = OTHER; note = 2'-deoxy-2'-fluorouridine-3'-phosphate
  modified_base 17: mod_base = OTHER; note = 2'-O-methylcytidine-3'-phosphate
  modified_base 18: mod_base = OTHER; note = 2'-O-methyluridine-3'-phosphate
  modified_base 19: mod_base = OTHER; note = 2'-O-methylguanosine-3'-phosphate
  modified_base 20: mod_base = OTHER; note = 2'-O-methyluridine-3'-phosphate
  modified_base 21: mod_base = OTHER; note = 2'-O-methylguanosine-3'-phosphorothioate
  modified_base 22: mod_base = OTHER; note = 2'-O-methylcytidine-3'-phosphorothioate
  modified_base 23: mod_base = OTHER; note = 2'-O-methylcytidine
tcactttattgagtttctgtgcc

SEQ ID NO: 138 - RNA, 21 nt, synthetic construct
  source 1..21: mol_type = other RNA
  modified_base 1: mod_base = OTHER; note = 2'-O-methylcytidine-3'-phosphorothioate
  modified_base 2: mod_base = OTHER; note = 2'-O-methyladenosine-3'-phosphorothioate
  modified_base 3: mod_base = OTHER; note = 2'-O-methyluridine-3'-phosphate
  modified_base 4: mod_base = OTHER; note = 2'-O-methyluridine-3'-phosphate
  modified_base 5: mod_base = OTHER; note = 2'-O-methyluridine-3'-phosphate
  modified_base 6: mod_base = OTHER; note = 2'-O-hexadecyl-uridine-3'-phosphate
  modified_base 7: mod_base = OTHER; note = 2'-deoxy-2'-fluoroadenosine-3'-phosphate
  modified_base 8: mod_base = OTHER; note = 2'-O-methyladenosine-3'-phosphate
  modified_base 9: mod_base = OTHER; note = 2'-deoxy-2'-fluorouridine-3'-phosphate
  modified_base 10: mod_base = OTHER; note = 2'-deoxy-2'-fluorocytidine-3'-phosphate
  modified_base 11: mod_base = OTHER; note = 2'-deoxy-2'-fluorocytidine-3'-phosphate
  modified_base 12: mod_base = OTHER; note = 2'-O-methyluridine-3'-phosphate
  modified_base 13: mod_base = OTHER; note = 2'-O-methylcytidine-3'-phosphate
  modified_base 14: mod_base = OTHER; note = 2'-O-methyladenosine-3'-phosphate
  modified_base 15: mod_base = OTHER; note = 2'-O-methylcytidine-3'-phosphate
  modified_base 16: mod_base = OTHER; note = 2'-O-methyluridine-3'-phosphate
  modified_base 17: mod_base = OTHER; note = 2'-O-methylcytidine-3'-phosphate
  modified_base 18: mod_base = OTHER; note = 2'-O-methyluridine-3'-phosphate
  modified_base 19: mod_base = OTHER; note = 2'-O-methyladenosine-3'-phosphorothioate
  modified_base 20: mod_base = OTHER; note = 2'-O-methyladenosine-3'-phosphorothioate
  modified_base 21: mod_base = OTHER; note = 2'-O-methyladenosine
cattttaatcctcactctaaa

SEQ ID NO: 139 - RNA, 23 nt, synthetic construct
  source 1..23: mol_type = other RNA
  modified_base 1: mod_base = OTHER; note = 2'-O-methyluridine-3'-phosphorothioate 5'-(E)-Vinylphosphonate
  modified_base 2: mod_base = OTHER; note = 2'-deoxy-2'-fluorouridine-3'-phosphorothioate
  modified_base 3: mod_base = OTHER; note = 2'-O-methyluridine-3'-phosphate
  modified_base 4: mod_base = OTHER; note = 2'-O-methyladenosine-3'-phosphate
  modified_base 5: mod_base = OTHER; note = 2'-O-methylguanosine-3'-phosphate
  modified_base 6: mod_base = OTHER; note = 2'-deoxy-2'-fluoroadenosine-3'-phosphate
  modified_base 7: mod_base = OTHER; note = 2'-O-methylguanosine-3'-phosphate
  modified_base 8: mod_base = OTHER; note = 2'-deoxy-2'-fluorouridine-3'-phosphate
  modified_base 9: mod_base = OTHER; note = 2'-deoxy-2'-fluoroguanosine-3'-phosphate
  modified_base 10: mod_base = OTHER; note = 2'-O-methyladenosine-3'-phosphate
  modified_base 11: mod_base = OTHER; note = 2'-O-methylguanosine-3'-phosphate
  modified_base 12: mod_base = OTHER; note = 2'-O-methylguanosine-3'-phosphate
  modified_base 13: mod_base = OTHER; note = 2'-O-methyladenosine-3'-phosphate
  modified_base 14: mod_base = OTHER; note = 2'-deoxy-2'-fluorouridine-3'-phosphate
  modified_base 15: mod_base = OTHER; note = 2'-O-methyluridine-3'-phosphate
  modified_base 16: mod_base = OTHER; note = 2'-deoxy-2'-fluoroadenosine-3'-phosphate
  modified_base 17: mod_base = OTHER; note = 2'-O-methyladenosine-3'-phosphate
  modified_base 18: mod_base = OTHER; note = 2'-O-methyladenosine-3'-phosphate
  modified_base 19: mod_base = OTHER; note = 2'-O-methyladenosine-3'-phosphate
  modified_base 20: mod_base = OTHER; note = 2'-O-methyluridine-3'-phosphate
  modified_base 21: mod_base = OTHER; note = 2'-O-methylguanosine-3'-phosphorothioate
  modified_base 22: mod_base = OTHER; note = 2'-O-methyladenosine-3'-phosphorothioate
  modified_base 23: mod_base = OTHER; note = 2'-O-methylguanosine
tttagagtgaggattaaaatgag

SEQ ID NO: 140 - RNA, 21 nt, synthetic construct
  source 1..21: mol_type = other RNA
  modified_base 1: mod_base = OTHER; note = 2'-O-methylcytidine-3'-phosphorothioate
  modified_base 2: mod_base = OTHER; note = 2'-O-methyladenosine-3'-phosphorothioate
  modified_base 3: mod_base = OTHER; note = 2'-O-methyluridine-3'-phosphate
  modified_base 4: mod_base = OTHER; note = 2'-O-methyluridine-3'-phosphate
  modified_base 5: mod_base = OTHER; note = 2'-O-methyluridine-3'-phosphate
  modified_base 6: mod_base = OTHER; note = 2'-O-hexadecyl-uridine-3'-phosphate
  modified_base 7: mod_base = OTHER; note = 2'-deoxy-2'-fluoroadenosine-3'-phosphate
  modified_base 8: mod_base = OTHER; note = 2'-O-methyladenosine-3'-phosphate
  modified_base 9: mod_base = OTHER; note = 2'-deoxy-2'-fluorouridine-3'-phosphate
  modified_base 10: mod_base = OTHER; note = 2'-deoxy-2'-fluorocytidine-3'-phosphate
  modified_base 11: mod_base = OTHER; note = 2'-deoxy-2'-fluorocytidine-3'-phosphate
  modified_base 12: mod_base = OTHER; note = 2'-O-methyluridine-3'-phosphate
  modified_base 13: mod_base = OTHER; note = 2'-O-methylcytidine-3'-phosphate
  modified_base 14: mod_base = OTHER; note = 2'-O-methyladenosine-3'-phosphate
  modified_base 15: mod_base = OTHER; note = 2'-O-methylcytidine-3'-phosphate
  modified_base 16: mod_base = OTHER; note = 2'-O-methyluridine-3'-phosphate
  modified_base 17: mod_base = OTHER; note = 2'-O-methylcytidine-3'-phosphate
  modified_base 18: mod_base = OTHER; note = 2'-O-methyluridine-3'-phosphate
  modified_base 19: mod_base = OTHER; note = 2'-O-methyladenosine-3'-phosphorothioate
  modified_base 20: mod_base = OTHER; note = 2'-O-methyladenosine-3'-phosphorothioate
  modified_base 21: mod_base = OTHER; note = 2'-O-methyladenosine
cattttaatcctcactctaaa

SEQ ID NO: 141 - RNA, 23 nt, synthetic construct
  source 1..23: mol_type = other RNA
  modified_base 1: mod_base = OTHER; note = 2'-O-methyluridine-3'-phosphorothioate
  modified_base 2: mod_base = OTHER; note = 2'-deoxy-2'-fluorouridine-3'-phosphorothioate
  modified_base 3: mod_base = OTHER; note = 2'-O-methyluridine-3'-phosphate
  modified_base 4: mod_base = OTHER; note = 2'-O-methyladenosine-3'-phosphate
  modified_base 5: mod_base = OTHER; note = 2'-O-methylguanosine-3'-phosphate
  modified_base 6: mod_base = OTHER; note = 2'-deoxy-2'-fluoroadenosine-3'-phosphate
  modified_base 7: mod_base = OTHER; note = 2'-O-methylguanosine-3'-phosphate
  modified_base 8: mod_base = OTHER; note = 2'-deoxy-2'-fluorouridine-3'-phosphate
  modified_base 9: mod_base = OTHER; note = 2'-deoxy-2'-fluoroguanosine-3'-phosphate
  modified_base 10: mod_base = OTHER; note = 2'-O-methyladenosine-3'-phosphate
  modified_base 11: mod_base = OTHER; note = 2'-O-methylguanosine-3'-phosphate
  modified_base 12: mod_base = OTHER; note = 2'-O-methylguanosine-3'-phosphate
  modified_base 13: mod_base = OTHER; note = 2'-O-methyladenosine-3'-phosphate
  modified_base 14: mod_base = OTHER; note = 2'-deoxy-2'-fluorouridine-3'-phosphate
  modified_base 15: mod_base = OTHER; note = 2'-O-methyluridine-3'-phosphate
  modified_base 16: mod_base = OTHER; note = 2'-deoxy-2'-fluoroadenosine-3'-phosphate
  modified_base 17: mod_base = OTHER; note = 2'-O-methyladenosine-3'-phosphate
  modified_base 18: mod_base = OTHER; note = 2'-O-methyladenosine-3'-phosphate
  modified_base 19: mod_base = OTHER; note = 2'-O-methyladenosine-3'-phosphate
  modified_base 20: mod_base = OTHER; note = 2'-O-methyluridine-3'-phosphate
  modified_base 21: mod_base = OTHER; note = 2'-O-methylguanosine-3'-phosphorothioate
  modified_base 22: mod_base = OTHER; note = 2'-O-methyladenosine-3'-phosphorothioate
  modified_base 23: mod_base = OTHER; note = 2'-O-methylguanosine
tttagagtgaggattaaaatgag

SEQ ID NO: 142 - RNA, 21 nt, synthetic construct
  source 1..21: mol_type = other RNA
  modified_base 1: mod_base = OTHER; note = 2'-O-methylcytidine-3'-phosphorothioate
  modified_base 2: mod_base = OTHER; note = 2'-O-methyladenosine-3'-phosphorothioate
  modified_base 3: mod_base = OTHER; note = 2'-O-methyluridine-3'-phosphate
  modified_base 4: mod_base = OTHER; note = 2'-O-methyluridine-3'-phosphate
  modified_base 5: mod_base = OTHER; note = 2'-O-methyluridine-3'-phosphate
  modified_base 6: mod_base = OTHER; note = 2'-O-hexadecyl-uridine-3'-phosphate
  modified_base 7: mod_base = OTHER; note = 2'-deoxy-2'-fluoroadenosine-3'-phosphate
  modified_base 8: mod_base = OTHER; note = 2'-O-methyladenosine-3'-phosphate
  modified_base 9: mod_base = OTHER; note = 2'-deoxy-2'-fluorouridine-3'-phosphate
  modified_base 10: mod_base = OTHER; note = 2'-deoxy-2'-fluorocytidine-3'-phosphate
  modified_base 11: mod_base = OTHER; note = 2'-deoxy-2'-fluorocytidine-3'-phosphate
  modified_base 12: mod_base = OTHER; note = 2'-O-methyluridine-3'-phosphate
  modified_base 13: mod_base = OTHER; note = 2'-O-methylcytidine-3'-phosphate
  modified_base 14: mod_base = OTHER; note = 2'-O-methyladenosine-3'-phosphate
  modified_base 15: mod_base = OTHER; note = 2'-O-methylcytidine-3'-phosphate
  modified_base 16: mod_base = OTHER; note = 2'-O-methyluridine-3'-phosphate
  modified_base 17: mod_base = OTHER; note = 2'-O-methylcytidine-3'-phosphate
  modified_base 18: mod_base = OTHER; note = 2'-O-methyluridine-3'-phosphate
  modified_base 19: mod_base = OTHER; note = 2'-O-methyladenosine-3'-phosphorothioate
  modified_base 20: mod_base = OTHER; note = 2'-O-methyladenosine-3'-phosphorothioate
  modified_base 21: mod_base = OTHER; note = 2'-O-methyladenosine
cattttaatcctcactctaaa

SEQ ID NO: 143 - RNA, 23 nt, synthetic construct
  source 1..23: mol_type = other RNA
  modified_base 1: mod_base = OTHER; note = 2'-O-methyluridine-3'-phosphorothioate 5'-(cis-3,3,5-trimethyl-1,2-dithiolan-4-yl thiophosphate)
  modified_base 2: mod_base = OTHER; note = 2'-deoxy-2'-fluorouridine-3'-phosphorothioate
  modified_base 3: mod_base = OTHER; note = 2'-O-methyluridine-3'-phosphate
  modified_base 4: mod_base = OTHER; note = 2'-O-methyladenosine-3'-phosphate
  modified_base 5: mod_base = OTHER; note = 2'-O-methylguanosine-3'-phosphate
  modified_base 6: mod_base = OTHER; note = 2'-deoxy-2'-fluoroadenosine-3'-phosphate
  modified_base 7: mod_base = OTHER; note = 2'-O-methylguanosine-3'-phosphate
  modified_base 8: mod_base = OTHER; note = 2'-deoxy-2'-fluorouridine-3'-phosphate
  modified_base 9: mod_base = OTHER; note = 2'-deoxy-2'-fluoroguanosine-3'-phosphate
  modified_base 10: mod_base = OTHER; note = 2'-O-methyladenosine-3'-phosphate
  modified_base 11: mod_base = OTHER; note = 2'-O-methylguanosine-3'-phosphate
  modified_base 12: mod_base = OTHER; note = 2'-O-methylguanosine-3'-phosphate
  modified_base 13: mod_base = OTHER; note = 2'-O-methyladenosine-3'-phosphate
  modified_base 14: mod_base = OTHER; note = 2'-deoxy-2'-fluorouridine-3'-phosphate
  modified_base 15: mod_base = OTHER; note = 2'-O-methyluridine-3'-phosphate
  modified_base 16: mod_base = OTHER; note = 2'-deoxy-2'-fluoroadenosine-3'-phosphate
  modified_base 17: mod_base = OTHER; note = 2'-O-methyladenosine-3'-phosphate
  modified_base 18: mod_base = OTHER; note = 2'-O-methyladenosine-3'-phosphate
  modified_base 19: mod_base = OTHER; note = 2'-O-methyladenosine-3'-phosphate
  modified_base 20: mod_base = OTHER; note = 2'-O-methyluridine-3'-phosphate
  modified_base 21: mod_base = OTHER; note = 2'-O-methylguanosine-3'-phosphorothioate
  modified_base 22: mod_base = OTHER; note = 2'-O-methyladenosine-3'-phosphorothioate
  modified_base 23: mod_base = OTHER; note = 2'-O-methylguanosine
tttagagtgaggattaaaatgag

SEQ ID NO: 144 - RNA, 21 nt, synthetic construct
  source 1..21: mol_type = other RNA
  modified_base 1: mod_base = OTHER; note = 2'-O-methylcytidine-3'-phosphorothioate
  modified_base 2: mod_base = OTHER; note = 2'-O-methyladenosine-3'-phosphorothioate
  modified_base 3: mod_base = OTHER; note = 2'-O-methyluridine-3'-phosphate
  modified_base 4: mod_base = OTHER; note = 2'-O-methyluridine-3'-phosphate
  modified_base 5: mod_base = OTHER; note = 2'-O-methyluridine-3'-phosphate
  modified_base 6: mod_base = OTHER; note = 2'-O-hexadecyl-uridine-3'-phosphate
  modified_base 7: mod_base = OTHER; note = 2'-deoxy-2'-fluoroadenosine-3'-phosphate
  modified_base 8: mod_base = OTHER; note = 2'-O-methyladenosine-3'-phosphate
  modified_base 9: mod_base = OTHER; note = 2'-deoxy-2'-fluorouridine-3'-phosphate
  modified_base 10: mod_base = OTHER; note = 2'-deoxy-2'-fluorocytidine-3'-phosphate
  modified_base 11: mod_base = OTHER; note = 2'-deoxy-2'-fluorocytidine-3'-phosphate
  modified_base 12: mod_base = OTHER; note = 2'-O-methyluridine-3'-phosphate
  modified_base 13: mod_base = OTHER; note = 2'-O-methylcytidine-3'-phosphate
  modified_base 14: mod_base = OTHER; note = 2'-O-methyladenosine-3'-phosphate
  modified_base 15: mod_base = OTHER; note = 2'-O-methylcytidine-3'-phosphate
  modified_base 16: mod_base = OTHER; note = 2'-O-methyluridine-3'-phosphate
  modified_base 17: mod_base = OTHER; note = 2'-O-methylcytidine-3'-phosphate
  modified_base 18: mod_base = OTHER; note = 2'-O-methyluridine-3'-phosphate
  modified_base 19: mod_base = OTHER; note = 2'-O-methyladenosine-3'-phosphorothioate
  modified_base 20: mod_base = OTHER; note = 2'-O-methyladenosine-3'-phosphorothioate
  modified_base 21: mod_base = OTHER; note = 2'-O-methyladenosine
cattttaatcctcactctaaa

SEQ ID NO: 145 - RNA, 23 nt, synthetic construct
  source 1..23: mol_type = other RNA
  modified_base 1: mod_base = OTHER; note = 2'-O-methyluridine-3'-phosphorothioate 5'-(trans-3,3,5-trimethyl-1,2-dithiolan-4-yl thiophosphate)
  modified_base 2: mod_base = OTHER; note = 2'-deoxy-2'-fluorouridine-3'-phosphorothioate
  modified_base 3: mod_base = OTHER; note = 2'-O-methyluridine-3'-phosphate
  modified_base 4: mod_base = OTHER; note = 2'-O-methyladenosine-3'-phosphate
  modified_base 5: mod_base = OTHER; note = 2'-O-methylguanosine-3'-phosphate
  modified_base 6: mod_base = OTHER; note = 2'-deoxy-2'-fluoroadenosine-3'-phosphate
  modified_base 7: mod_base = OTHER; note = 2'-O-methylguanosine-3'-phosphate
  modified_base 8: mod_base = OTHER; note = 2'-deoxy-2'-fluorouridine-3'-phosphate
  modified_base 9: mod_base = OTHER; note = 2'-deoxy-2'-fluoroguanosine-3'-phosphate
  modified_base 10: mod_base = OTHER; note = 2'-O-methyladenosine-3'-phosphate
  modified_base 11: mod_base = OTHER; note = 2'-O-methylguanosine-3'-phosphate
  modified_base 12: mod_base = OTHER; note = 2'-O-methylguanosine-3'-phosphate
  modified_base 13: mod_base = OTHER; note = 2'-O-methyladenosine-3'-phosphate
  modified_base 14: mod_base = OTHER; note = 2'-deoxy-2'-fluorouridine-3'-phosphate
  modified_base 15: mod_base = OTHER; note = 2'-O-methyluridine-3'-phosphate
  modified_base 16: mod_base = OTHER; note = 2'-deoxy-2'-fluoroadenosine-3'-phosphate
  modified_base 17: mod_base = OTHER; note = 2'-O-methyladenosine-3'-phosphate
  modified_base 18: mod_base = OTHER; note = 2'-O-methyladenosine-3'-phosphate
  modified_base 19: mod_base = OTHER; note = 2'-O-methyladenosine-3'-phosphate
  modified_base 20: mod_base = OTHER; note = 2'-O-methyluridine-3'-phosphate
  modified_base 21: mod_base = OTHER; note = 2'-O-methylguanosine-3'-phosphorothioate
  modified_base 22: mod_base = OTHER; note = 2'-O-methyladenosine-3'-phosphorothioate
  modified_base 23: mod_base = OTHER; note = 2'-O-methylguanosine
tttagagtgaggattaaaatgag

SEQ ID NO: 146 - RNA, 21 nt, synthetic construct
  source 1..21: mol_type = other RNA
  modified_base 1: mod_base = OTHER; note = 2'-O-methylcytidine-3'-phosphorothioate
  modified_base 2: mod_base = OTHER; note = 2'-O-methyladenosine-3'-phosphorothioate
  modified_base 3: mod_base = OTHER; note = 2'-O-methyluridine-3'-phosphate
  modified_base 4: mod_base = OTHER; note = 2'-O-methyluridine-3'-phosphate
  modified_base 5: mod_base = OTHER; note = 2'-O-methyluridine-3'-phosphate
  modified_base 6: mod_base = OTHER; note = 2'-O-hexadecyl-uridine-3'-phosphate
  modified_base 7: mod_base = OTHER; note = 2'-deoxy-2'-fluoroadenosine-3'-phosphate
  modified_base 8: mod_base = OTHER; note = 2'-O-methyladenosine-3'-phosphate
  modified_base 9: mod_base = OTHER; note = 2'-deoxy-2'-fluorouridine-3'-phosphate
  modified_base 10: mod_base = OTHER; note = 2'-deoxy-2'-fluorocytidine-3'-phosphate
  modified_base 11: mod_base = OTHER; note = 2'-deoxy-2'-fluorocytidine-3'-phosphate
  modified_base 12: mod_base = OTHER; note = 2'-O-methyluridine-3'-phosphate
  modified_base 13: mod_base = OTHER; note = 2'-O-methylcytidine-3'-phosphate
  modified_base 14: mod_base = OTHER; note = 2'-O-methyladenosine-3'-phosphate
  modified_base 15: mod_base = OTHER; note = 2'-O-methylcytidine-3'-phosphate
  modified_base 16: mod_base = OTHER; note = 2'-O-methyluridine-3'-phosphate
  modified_base 17: mod_base = OTHER; note = 2'-O-methylcytidine-3'-phosphate
  modified_base 18: mod_base = OTHER; note = 2'-O-methyluridine-3'-phosphate
  modified_base 19: mod_base = OTHER; note = 2'-O-methyladenosine-3'-phosphorothioate
  modified_base 20: mod_base = OTHER; note = 2'-O-methyladenosine-3'-phosphorothioate
  modified_base 21: mod_base = OTHER; note = 2'-O-methyladenosine
cattttaatcctcactctaaa

SEQ ID NO: 147 - RNA, 23 nt, synthetic construct
  source 1..23: mol_type = other RNA
  modified_base 1: mod_base = OTHER; note = 2'-O-methyluridine-3'-phosphorothioate 5'-(trans-5-hydroxy-1,2-dithian-4-yl thiophosphate)
  modified_base 2: mod_base = OTHER; note = 2'-deoxy-2'-fluorouridine-3'-phosphorothioate
  modified_base 3: mod_base = OTHER; note = 2'-O-methyluridine-3'-phosphate
  modified_base 4: mod_base = OTHER; note = 2'-O-methyladenosine-3'-phosphate
  modified_base 5: mod_base = OTHER; note = 2'-O-methylguanosine-3'-phosphate
  modified_base 6: mod_base = OTHER; note = 2'-deoxy-2'-fluoroadenosine-3'-phosphate
  modified_base 7: mod_base = OTHER; note = 2'-O-methylguanosine-3'-phosphate
  modified_base 8: mod_base = OTHER; note = 2'-deoxy-2'-fluorouridine-3'-phosphate
  modified_base 9: mod_base = OTHER; note = 2'-deoxy-2'-fluoroguanosine-3'-phosphate
  modified_base 10: mod_base = OTHER; note = 2'-O-methyladenosine-3'-phosphate
  modified_base 11: mod_base = OTHER; note = 2'-O-methylguanosine-3'-phosphate
  modified_base 12: mod_base = OTHER; note = 2'-O-methylguanosine-3'-phosphate
  modified_base 13: mod_base = OTHER; note = 2'-O-methyladenosine-3'-phosphate
  modified_base 14: mod_base = OTHER; note = 2'-deoxy-2'-fluorouridine-3'-phosphate
  modified_base 15: mod_base = OTHER; note = 2'-O-methyluridine-3'-phosphate
  modified_base 16: mod_base = OTHER; note = 2'-deoxy-2'-fluoroadenosine-3'-phosphate
  modified_base 17: mod_base = OTHER; note = 2'-O-methyladenosine-3'-phosphate
  modified_base 18: mod_base = OTHER; note = 2'-O-methyladenosine-3'-phosphate
  modified_base 19: mod_base = OTHER; note = 2'-O-methyladenosine-3'-phosphate
  modified_base 20: mod_base = OTHER; note = 2'-O-methyluridine-3'-phosphate
  modified_base 21: mod_base = OTHER; note = 2'-O-methylguanosine-3'-phosphorothioate
  modified_base 22: mod_base = OTHER; note = 2'-O-methyladenosine-3'-phosphorothioate
  modified_base 23: mod_base = OTHER; note = 2'-O-methylguanosine
tttagagtgaggattaaaatgag

SEQ ID NO: 148 - RNA, 21 nt, synthetic construct
  source 1..21: mol_type = other RNA
  modified_base 1: mod_base = OTHER; note = 2'-O-methylcytidine-3'-phosphorothioate
  modified_base 2: mod_base = OTHER; note = 2'-O-methyladenosine-3'-phosphorothioate
  modified_base 3: mod_base = OTHER; note = 2'-O-methyluridine-3'-phosphate
  modified_base 4: mod_base = OTHER; note = 2'-O-methyluridine-3'-phosphate
  modified_base 5: mod_base = OTHER; note = 2'-O-methyluridine-3'-phosphate
  modified_base 6: mod_base = OTHER; note = 2'-O-hexadecyl-uridine-3'-phosphate
  modified_base 7: mod_base = OTHER; note = 2'-deoxy-2'-fluoroadenosine-3'-phosphate
  modified_base 8: mod_base = OTHER; note = 2'-O-methyladenosine-3'-phosphate
  modified_base 9: mod_base = OTHER; note = 2'-deoxy-2'-fluorouridine-3'-phosphate
  modified_base 10: mod_base = OTHER; note = 2'-deoxy-2'-fluorocytidine-3'-phosphate
  modified_base 11: mod_base = OTHER; note = 2'-deoxy-2'-fluorocytidine-3'-phosphate
  modified_base 12: mod_base = OTHER; note = 2'-O-methyluridine-3'-phosphate
  modified_base 13: mod_base = OTHER; note = 2'-O-methylcytidine-3'-phosphate
  modified_base 14: mod_base = OTHER; note = 2'-O-methyladenosine-3'-phosphate
  modified_base 15: mod_base = OTHER; note = 2'-O-methylcytidine-3'-phosphate
  modified_base 16: mod_base = OTHER; note = 2'-O-methyluridine-3'-phosphate
  modified_base 17: mod_base = OTHER; note = 2'-O-methylcytidine-3'-phosphate
  modified_base 18: mod_base = OTHER; note = 2'-O-methyluridine-3'-phosphate
  modified_base 19: mod_base = OTHER; note = 2'-O-methyladenosine-3'-phosphorothioate
  modified_base 20: mod_base = OTHER; note = 2'-O-methyladenosine-3'-phosphorothioate
  modified_base 21: mod_base = OTHER; note = 2'-O-methyladenosine
cattttaatcctcactctaaa

SEQ ID NO: 149 - RNA, 23 nt, synthetic construct
  source 1..23: mol_type = other RNA
  modified_base 1: mod_base = OTHER; note = uridine-3'-phosphorothioate 5'-(cis-3,3,5-trimethyl-1,2-dithiolan-4-yl thiophosphate)
  modified_base 2: mod_base = OTHER; note = 2'-deoxy-2'-fluorouridine-3'-phosphorothioate
  modified_base 3: mod_base = OTHER; note = 2'-O-methyluridine-3'-phosphate
  modified_base 4: mod_base = OTHER; note = 2'-O-methyladenosine-3'-phosphate
  modified_base 5: mod_base = OTHER; note = 2'-O-methylguanosine-3'-phosphate
  modified_base 6: mod_base = OTHER; note = 2'-deoxy-2'-fluoroadenosine-3'-phosphate
  modified_base 7: mod_base = OTHER; note = 2'-O-methylguanosine-3'-phosphate
  modified_base 8: mod_base = OTHER; note = 2'-deoxy-2'-fluorouridine-3'-phosphate
  modified_base 9: mod_base = OTHER; note = 2'-deoxy-2'-fluoroguanosine-3'-phosphate
  modified_base 10: mod_base = OTHER; note = 2'-O-methyladenosine-3'-phosphate
  modified_base 11: mod_base = OTHER; note = 2'-O-methylguanosine-3'-phosphate
  modified_base 12: mod_base = OTHER; note = 2'-O-methylguanosine-3'-phosphate
  modified_base 13: mod_base = OTHER; note = 2'-O-methyladenosine-3'-phosphate
  modified_base 14: mod_base = OTHER; note = 2'-deoxy-2'-fluorouridine-3'-phosphate
  modified_base 15: mod_base = OTHER; note = 2'-O-methyluridine-3'-phosphate
  modified_base 16: mod_base = OTHER; note = 2'-deoxy-2'-fluoroadenosine-3'-phosphate
  modified_base 17: mod_base = OTHER; note = 2'-O-methyladenosine-3'-phosphate
  modified_base 18: mod_base = OTHER; note = 2'-O-methyladenosine-3'-phosphate
  modified_base 19: mod_base = OTHER; note = 2'-O-methyladenosine-3'-phosphate
  modified_base 20: mod_base = OTHER; note = 2'-O-methyluridine-3'-phosphate
  modified_base 21: mod_base = OTHER; note = 2'-O-methylguanosine-3'-phosphorothioate
  modified_base 22: mod_base = OTHER; note = 2'-O-methyladenosine-3'-phosphorothioate
  modified_base 23: mod_base = OTHER; note = 2'-O-methylguanosine
tttagagtgaggattaaaatgag

SEQ ID NO: 150 - RNA, 21 nt, synthetic construct
  source 1..21: mol_type = other RNA
  modified_base 1: mod_base = OTHER; note = 2'-O-methylcytidine-3'-phosphorothioate
  modified_base 2: mod_base = OTHER; note = 2'-O-methyladenosine-3'-phosphorothioate
  modified_base 3: mod_base = OTHER; note = 2'-O-methyluridine-3'-phosphate
  modified_base 4: mod_base = OTHER; note = 2'-O-methyluridine-3'-phosphate
  modified_base 5: mod_base = OTHER; note = 2'-O-methyluridine-3'-phosphate
  modified_base 6: mod_base = OTHER; note = 2'-O-hexadecyl-uridine-3'-phosphate
  modified_base 7: mod_base = OTHER; note = 2'-deoxy-2'-fluoroadenosine-3'-phosphate
  modified_base 8: mod_base = OTHER; note = 2'-O-methyladenosine-3'-phosphate
  modified_base 9: mod_base = OTHER; note = 2'-deoxy-2'-fluorouridine-3'-phosphate
  modified_base 10: mod_base = OTHER; note = 2'-deoxy-2'-fluorocytidine-3'-phosphate
  modified_base 11: mod_base = OTHER; note = 2'-deoxy-2'-fluorocytidine-3'-phosphate
  modified_base 12: mod_base = OTHER; note = 2'-O-methyluridine-3'-phosphate
  modified_base 13: mod_base = OTHER; note = 2'-O-methylcytidine-3'-phosphate
  modified_base 14: mod_base = OTHER; note = 2'-O-methyladenosine-3'-phosphate
  modified_base 15: mod_base = OTHER; note = 2'-O-methylcytidine-3'-phosphate
  modified_base 16: mod_base = OTHER; note = 2'-O-methyluridine-3'-phosphate
  modified_base 17: mod_base = OTHER; note = 2'-O-methylcytidine-3'-phosphate
  modified_base 18: mod_base = OTHER; note = 2'-O-methyluridine-3'-phosphate
  modified_base 19: mod_base = OTHER; note = 2'-O-methyladenosine-3'-phosphorothioate
  modified_base 20: mod_base = OTHER; note = 2'-O-methyladenosine-3'-phosphorothioate
  modified_base 21: mod_base = OTHER; note = 2'-O-methyladenosine
cattttaatcctcactctaaa

SEQ ID NO: 151 - RNA, 23 nt, synthetic construct
  source 1..23: mol_type = other RNA
  modified_base 1: mod_base = OTHER; note = uridine-3'-phosphorothioate 5'-(cis-3,3,5-trimethyl-1,2-dithiolan-4-yl thiophosphate)
  modified_base 2: mod_base = OTHER; note = 2'-deoxy-2'-fluoro-5'-(S)-methyluridine 3'-phosphorothioate
  modified_base 3: mod_base = OTHER; note = 2'-O-methyluridine-3'-phosphate
  modified_base 4: mod_base = OTHER; note = 2'-O-methyladenosine-3'-phosphate
  modified_base 5: mod_base = OTHER; note = 2'-O-methylguanosine-3'-phosphate
  modified_base 6: mod_base = OTHER; note = 2'-deoxy-2'-fluoroadenosine-3'-phosphate
  modified_base 7: mod_base = OTHER; note = 2'-O-methylguanosine-3'-phosphate
  modified_base 8: mod_base = OTHER; note = 2'-deoxy-2'-fluorouridine-3'-phosphate
  modified_base 9: mod_base = OTHER; note = 2'-deoxy-2'-fluoroguanosine-3'-phosphate
  modified_base 10: mod_base = OTHER; note = 2'-O-methyladenosine-3'-phosphate
  modified_base 11: mod_base = OTHER; note = 2'-O-methylguanosine-3'-phosphate
  modified_base 12: mod_base = OTHER; note = 2'-O-methylguanosine-3'-phosphate
  modified_base 13: mod_base = OTHER; note = 2'-O-methyladenosine-3'-phosphate
  modified_base 14: mod_base = OTHER; note = 2'-deoxy-2'-fluorouridine-3'-phosphate
  modified_base 15: mod_base = OTHER; note = 2'-O-methyluridine-3'-phosphate
  modified_base 16: mod_base = OTHER; note = 2'-deoxy-2'-fluoroadenosine-3'-phosphate
  modified_base 17: mod_base = OTHER; note = 2'-O-methyladenosine-3'-phosphate
  modified_base 18: mod_base = OTHER; note = 2'-O-methyladenosine-3'-phosphate
  modified_base 19: mod_base = OTHER; note = 2'-O-methyladenosine-3'-phosphate
  modified_base 20: mod_base = OTHER; note = 2'-O-methyluridine-3'-phosphate
  modified_base 21: mod_base = OTHER; note = 2'-O-methylguanosine-3'-phosphorothioate
  modified_base 22: mod_base = OTHER; note = 2'-O-methyladenosine-3'-phosphorothioate
  modified_base 23: mod_base = OTHER; note = 2'-O-methylguanosine
tttagagtgaggattaaaatgag

SEQ ID NO: 152 - RNA, 21 nt, synthetic construct
  source 1..21: mol_type = other RNA
  modified_base 1: mod_base = OTHER; note = 2'-O-methylcytidine-3'-phosphorothioate
  modified_base 2: mod_base = OTHER; note = 2'-O-methyladenosine-3'-phosphorothioate
  modified_base 3: mod_base = OTHER; note = 2'-O-methyluridine-3'-phosphate
  modified_base 4: mod_base = OTHER; note = 2'-O-methyluridine-3'-phosphate
  modified_base 5: mod_base = OTHER; note = 2'-O-methyluridine-3'-phosphate
  modified_base 6: mod_base = OTHER; note = 2'-O-hexadecyl-uridine-3'-phosphate
  modified_base 7: mod_base = OTHER; note = 2'-deoxy-2'-fluoroadenosine-3'-phosphate
  modified_base 8: mod_base = OTHER; note = 2'-O-methyladenosine-3'-phosphate
  modified_base 9: mod_base = OTHER; note = 2'-deoxy-2'-fluorouridine-3'-phosphate
  modified_base 10: mod_base = OTHER; note = 2'-deoxy-2'-fluorocytidine-3'-phosphate
  modified_base 11: mod_base = OTHER; note = 2'-deoxy-2'-fluorocytidine-3'-phosphate
  modified_base 12: mod_base = OTHER; note = 2'-O-methyluridine-3'-phosphate
  modified_base 13: mod_base = OTHER; note = 2'-O-methylcytidine-3'-phosphate
  modified_base 14: mod_base = OTHER; note = 2'-O-methyladenosine-3'-phosphate
  modified_base 15: mod_base = OTHER; note = 2'-O-methylcytidine-3'-phosphate
  modified_base 16: mod_base = OTHER; note = 2'-O-methyluridine-3'-phosphate
  modified_base 17: mod_base = OTHER; note = 2'-O-methylcytidine-3'-phosphate
  modified_base 18: mod_base = OTHER; note = 2'-O-methyluridine-3'-phosphate
  modified_base 19: mod_base = OTHER; note = 2'-O-methyladenosine-3'-phosphorothioate
  modified_base 20: mod_base = OTHER; note = 2'-O-methyladenosine-3'-phosphorothioate
  modified_base 21: mod_base = OTHER; note = 2'-O-methyladenosine
cattttaatcctcactctaaa

SEQ ID NO: 153 - RNA, 23 nt, synthetic construct
  source 1..23: mol_type = other RNA
  modified_base 1: mod_base = OTHER; note = uridine 3'-(R)-phosphorothioate 5'-(cis-3,3,5-trimethyl-1,2-dithiolan-4-yl thiophosphate)
  modified_base 2: mod_base = OTHER; note = 2'-deoxy-2'-fluoro-5'-(S)-methyluridine 3'-phosphorothioate
  modified_base 3: mod_base = OTHER; note = 2'-O-methyluridine-3'-phosphate
  modified_base 4: mod_base = OTHER; note = 2'-O-methyladenosine-3'-phosphate
  modified_base 5: mod_base = OTHER; note = 2'-O-methylguanosine-3'-phosphate
  modified_base 6: mod_base = OTHER; note = 2'-deoxy-2'-fluoroadenosine-3'-phosphate
  modified_base 7: mod_base = OTHER; note = 2'-O-methylguanosine-3'-phosphate
  modified_base 8: mod_base = OTHER; note = 2'-deoxy-2'-fluorouridine-3'-phosphate
  modified_base 9: mod_base = OTHER; note = 2'-deoxy-2'-fluoroguanosine-3'-phosphate
  modified_base 10: mod_base = OTHER; note = 2'-O-methyladenosine-3'-phosphate
  modified_base 11: mod_base = OTHER; note = 2'-O-methylguanosine-3'-phosphate
  modified_base 12: mod_base = OTHER; note = 2'-O-methylguanosine-3'-phosphate
  modified_base 13: mod_base = OTHER; note = 2'-O-methyladenosine-3'-phosphate
  modified_base 14: mod_base = OTHER; note = 2'-deoxy-2'-fluorouridine-3'-phosphate
  modified_base 15: mod_base = OTHER; note = 2'-O-methyluridine-3'-phosphate
  modified_base 16: mod_base = OTHER; note = 2'-deoxy-2'-fluoroadenosine-3'-phosphate
  modified_base 17: mod_base = OTHER; note = 2'-O-methyladenosine-3'-phosphate
  modified_base 18: mod_base = OTHER; note = 2'-O-methyladenosine-3'-phosphate
  modified_base 19: mod_base = OTHER; note = 2'-O-methyladenosine-3'-phosphate
  modified_base 20: mod_base = OTHER; note = 2'-O-methyluridine-3'-phosphate
  modified_base 21: mod_base = OTHER; note = 2'-O-methylguanosine-3'-phosphorothioate
  modified_base 22: mod_base = OTHER; note = 2'-O-methyladenosine-3'-phosphorothioate
  modified_base 23: mod_base = OTHER; note = 2'-O-methylguanosine
tttagagtgaggattaaaatgag

SEQ ID NO: 154 - RNA, 21 nt, synthetic construct
  source 1..21: mol_type = other RNA
  modified_base 1: mod_base = OTHER; note = 2'-O-methylcytidine-3'-phosphorothioate
  modified_base 2: mod_base = OTHER; note = 2'-O-methyladenosine-3'-phosphorothioate
  modified_base 3: mod_base = OTHER; note = 2'-O-methyluridine-3'-phosphate
  modified_base 4: mod_base = OTHER; note = 2'-O-methyluridine-3'-phosphate
  modified_base 5: mod_base = OTHER; note = 2'-O-methyluridine-3'-phosphate
  modified_base 6: mod_base = OTHER; note = 2'-O-hexadecyl-uridine-3'-phosphate
  modified_base 7: mod_base = OTHER; note = 2'-deoxy-2'-fluoroadenosine-3'-phosphate
  modified_base 8: mod_base = OTHER; note = 2'-O-methyladenosine-3'-phosphate
  modified_base 9: mod_base = OTHER; note = 2'-deoxy-2'-fluorouridine-3'-phosphate
  modified_base 10: mod_base = OTHER; note = 2'-deoxy-2'-fluorocytidine-3'-phosphate
  modified_base 11: mod_base = OTHER; note = 2'-deoxy-2'-fluorocytidine-3'-phosphate
  modified_base 12: mod_base = OTHER; note = 2'-O-methyluridine-3'-phosphate
  modified_base 13: mod_base = OTHER; note = 2'-O-methylcytidine-3'-phosphate
  modified_base 14: mod_base = OTHER; note = 2'-O-methyladenosine-3'-phosphate
  modified_base 15: mod_base = OTHER; note = 2'-O-methylcytidine-3'-phosphate
  modified_base 16: mod_base = OTHER; note = 2'-O-methyluridine-3'-phosphate
  modified_base 17: mod_base = OTHER; note = 2'-O-methylcytidine-3'-phosphate
  modified_base 18: mod_base = OTHER; note = 2'-O-methyluridine-3'-phosphate
  modified_base 19: mod_base = OTHER; note = 2'-O-methyladenosine-3'-phosphorothioate
  modified_base 20: mod_base = OTHER; note = 2'-O-methyladenosine-3'-phosphorothioate
  modified_base 21: mod_base = OTHER; note = 2'-O-methyladenosine
cattttaatcctcactctaaa

SEQ ID NO: 155 - RNA, 23 nt, synthetic construct
  source 1..23: mol_type = other RNA
  modified_base 1: mod_base = OTHER; note = 2'-O-methyluridine-3'-phosphorothioate 5'-(cis-5-phenyl-3,3-dimethyl-1,2-dithiolan-4-yl thiophosphate)
  modified_base 2: mod_base = OTHER; note = 2'-deoxy-2'-fluorouridine-3'-phosphorothioate
  modified_base 3: mod_base = OTHER; note = 2'-O-methyluridine-3'-phosphate
  modified_base 4: mod_base = OTHER; note = 2'-O-methyladenosine-3'-phosphate
  modified_base 5: mod_base = OTHER; note = 2'-O-methylguanosine-3'-phosphate
  modified_base 6: mod_base = OTHER; note = 2'-deoxy-2'-fluoroadenosine-3'-phosphate
  modified_base 7: mod_base = OTHER; note = 2'-O-methylguanosine-3'-phosphate
  modified_base 8: mod_base = OTHER; note = 2'-deoxy-2'-fluorouridine-3'-phosphate
  modified_base 9: mod_base = OTHER; note = 2'-deoxy-2'-fluoroguanosine-3'-phosphate
  modified_base 10: mod_base = OTHER; note = 2'-O-methyladenosine-3'-phosphate
  modified_base 11: mod_base = OTHER; note = 2'-O-methylguanosine-3'-phosphate
  modified_base 12: mod_base = OTHER; note = 2'-O-methylguanosine-3'-phosphate
  modified_base 13: mod_base = OTHER; note = 2'-O-methyladenosine-3'-phosphate
  modified_base 14: mod_base = OTHER; note = 2'-deoxy-2'-fluorouridine-3'-phosphate
  modified_base 15: mod_base = OTHER; note = 2'-O-methyluridine-3'-phosphate
  modified_base 16: mod_base = OTHER; note = 2'-deoxy-2'-fluoroadenosine-3'-phosphate
  modified_base 17: mod_base = OTHER; note = 2'-O-methyladenosine-3'-phosphate
  modified_base 18: mod_base = OTHER; note = 2'-O-methyladenosine-3'-phosphate
  modified_base 19: mod_base = OTHER; note = 2'-O-methyladenosine-3'-phosphate
  modified_base 20: mod_base = OTHER; note = 2'-O-methyluridine-3'-phosphate
  modified_base 21: mod_base = OTHER; note = 2'-O-methylguanosine-3'-phosphorothioate
  modified_base 22: mod_base = OTHER; note = 2'-O-methyladenosine-3'-phosphorothioate
  modified_base 23: mod_base = OTHER; note = 2'-O-methylguanosine
tttagagtgaggattaaaatgag

SEQ ID NO: 156 - RNA, 21 nt, synthetic construct
  source 1..21: mol_type = other RNA
  modified_base 1: mod_base = OTHER; note = 2'-O-methylcytidine-3'-phosphorothioate
  modified_base 2: mod_base = OTHER; note = 2'-O-methyladenosine-3'-phosphorothioate
  modified_base 3: mod_base = OTHER; note = 2'-O-methyluridine-3'-phosphate
  modified_base 4: mod_base = OTHER; note = 2'-O-methyluridine-3'-phosphate
  modified_base 5: mod_base = OTHER; note = 2'-O-methyluridine-3'-phosphate
  modified_base 6: mod_base = OTHER; note = 2'-O-hexadecyl-uridine-3'-phosphate
  modified_base 7: mod_base = OTHER; note = 2'-deoxy-2'-fluoroadenosine-3'-phosphate
  modified_base 8: mod_base = OTHER; note = 2'-O-methyladenosine-3'-phosphate
  modified_base 9: mod_base = OTHER; note = 2'-deoxy-2'-fluorouridine-3'-phosphate
  modified_base 10: mod_base = OTHER; note = 2'-deoxy-2'-fluorocytidine-3'-phosphate
  modified_base 11: mod_base = OTHER; note = 2'-deoxy-2'-fluorocytidine-3'-phosphate
  modified_base 12: mod_base = OTHER; note = 2'-O-methyluridine-3'-phosphate
  modified_base 13: mod_base = OTHER; note = 2'-O-methylcytidine-3'-phosphate
  modified_base 14: mod_base = OTHER; note = 2'-O-methyladenosine-3'-phosphate
  modified_base 15: mod_base = OTHER; note = 2'-O-methylcytidine-3'-phosphate
  modified_base 16: mod_base = OTHER; note = 2'-O-methyluridine-3'-phosphate
  modified_base 17: mod_base = OTHER; note = 2'-O-methylcytidine-3'-phosphate
  modified_base 18: mod_base = OTHER; note = 2'-O-methyluridine-3'-phosphate
  modified_base 19: mod_base = OTHER; note = 2'-O-methyladenosine-3'-phosphorothioate
  modified_base 20: mod_base = OTHER; note = 2'-O-methyladenosine-3'-phosphorothioate
  modified_base 21: mod_base = OTHER; note = 2'-O-methyladenosine
cattttaatcctcactctaaa

SEQ ID NO: 157 - RNA, 23 nt, synthetic construct
  source 1..23: mol_type = other RNA
  modified_base 1: mod_base = OTHER; note = 2'-O-methyluridine-3'-phosphorothioate 5'-(cis-5-(4-methylphenyl)-3,3-dimethyl-1,2-dithiolan-4-yl thiophosphate)
  modified_base 2: mod_base = OTHER; note = 2'-deoxy-2'-fluorouridine-3'-phosphorothioate
  modified_base 3: mod_base = OTHER; note = 2'-O-methyluridine-3'-phosphate
  modified_base 4: mod_base = OTHER; note = 2'-O-methyladenosine-3'-phosphate
  modified_base 5: mod_base = OTHER; note = 2'-O-methylguanosine-3'-phosphate
  modified_base 6: mod_base = OTHER; note = 2'-deoxy-2'-fluoroadenosine-3'-phosphate
  modified_base 7: mod_base = OTHER; note = 2'-O-methylguanosine-3'-phosphate
  modified_base 8: mod_base = OTHER; note = 2'-deoxy-2'-fluorouridine-3'-phosphate
  modified_base 9: mod_base = OTHER; note = 2'-deoxy-2'-fluoroguanosine-3'-phosphate
  modified_base 10: mod_base = OTHER; note = 2'-O-methyladenosine-3'-phosphate
  modified_base 11: mod_base = OTHER; note = 2'-O-methylguanosine-3'-phosphate
  modified_base 12: mod_base = OTHER; note = 2'-O-methylguanosine-3'-phosphate
  modified_base 13: mod_base = OTHER; note = 2'-O-methyladenosine-3'-phosphate
  modified_base 14: mod_base = OTHER; note = 2'-deoxy-2'-fluorouridine-3'-phosphate
  modified_base 15: mod_base = OTHER; note = 2'-O-methyluridine-3'-phosphate
  modified_base 16: mod_base = OTHER; note = 2'-deoxy-2'-fluoroadenosine-3'-phosphate
  modified_base 17: mod_base = OTHER; note = 2'-O-methyladenosine-3'-phosphate
  modified_base 18: mod_base = OTHER; note = 2'-O-methyladenosine-3'-phosphate
  modified_base 19: mod_base = OTHER; note = 2'-O-methyladenosine-3'-phosphate
  modified_base 20: mod_base = OTHER; note = 2'-O-methyluridine-3'-phosphate
  modified_base 21: mod_base = OTHER; note = 2'-O-methylguanosine-3'-phosphorothioate
  modified_base 22: mod_base = OTHER; note = 2'-O-methyladenosine-3'-phosphorothioate
  modified_base 23: mod_base = OTHER; note = 2'-O-methylguanosine
tttagagtgaggattaaaatgag

SEQ ID NO: 158 - RNA, 21 nt, synthetic construct
  source 1..21: mol_type = other RNA
  modified_base 1: mod_base = OTHER; note = 2'-O-methylcytidine-3'-phosphorothioate
  modified_base 2: mod_base = OTHER; note = 2'-O-methyladenosine-3'-phosphorothioate
  modified_base 3: mod_base = OTHER; note = 2'-O-methyluridine-3'-phosphate
  modified_base 4: mod_base = OTHER; note = 2'-O-methyluridine-3'-phosphate
  modified_base 5: mod_base = OTHER; note = 2'-O-methyluridine-3'-phosphate
  modified_base 6: mod_base = OTHER; note = 2'-O-hexadecyl-uridine-3'-phosphate
  modified_base 7: mod_base = OTHER; note = 2'-deoxy-2'-fluoroadenosine-3'-phosphate
  modified_base 8: mod_base = OTHER; note = 2'-O-methyladenosine-3'-phosphate
  modified_base 9: mod_base = OTHER; note = 2'-deoxy-2'-fluorouridine-3'-phosphate
  modified_base 10: mod_base = OTHER; note = 2'-deoxy-2'-fluorocytidine-3'-phosphate
  modified_base 11: mod_base = OTHER; note = 2'-deoxy-2'-fluorocytidine-3'-phosphate
  modified_base 12: mod_base = OTHER; note = 2'-O-methyluridine-3'-phosphate
  modified_base 13: mod_base = OTHER; note = 2'-O-methylcytidine-3'-phosphate
  modified_base 14: mod_base = OTHER; note = 2'-O-methyladenosine-3'-phosphate
  modified_base 15: mod_base = OTHER; note = 2'-O-methylcytidine-3'-phosphate
  modified_base 16: mod_base = OTHER; note = 2'-O-methyluridine-3'-phosphate
  modified_base 17: mod_base = OTHER; note = 2'-O-methylcytidine-3'-phosphate
  modified_base 18: mod_base = OTHER; note = 2'-O-methyluridine-3'-phosphate
  modified_base 19: mod_base = OTHER; note = 2'-O-methyladenosine-3'-phosphorothioate
  modified_base 20: mod_base = OTHER; note = 2'-O-methyladenosine-3'-phosphorothioate
  modified_base 21: mod_base = OTHER; note = 2'-O-methyladenosine
cattttaatcctcactctaaa

SEQ ID NO: 159 - RNA, 23 nt, synthetic construct
  source 1..23: mol_type = other RNA
  modified_base 1: mod_base = OTHER; note = 2'-O-methyluridine-3'-phosphorothioate 5'-(cis-5-(4-methoxyphenyl)-3,3-dimethyl-1,2-dithiolan-4-yl thiophosphate)
  modified_base 2: mod_base = OTHER; note = 2'-deoxy-2'-fluorouridine-3'-phosphorothioate
  modified_base 3: mod_base = OTHER; note = 2'-O-methyluridine-3'-phosphate
  modified_base 4: mod_base = OTHER; note = 2'-O-methyladenosine-3'-phosphate
  modified_base 5: mod_base = OTHER; note = 2'-O-methylguanosine-3'-phosphate
  modified_base 6: mod_base = OTHER; note = 2'-deoxy-2'-fluoroadenosine-3'-phosphate
  modified_base 7: mod_base = OTHER; note = 2'-O-methylguanosine-3'-phosphate
  modified_base 8: mod_base = OTHER; note = 2'-deoxy-2'-fluorouridine-3'-phosphate
  modified_base 9: mod_base = OTHER; note = 2'-deoxy-2'-fluoroguanosine-3'-phosphate
  modified_base 10: mod_base = OTHER; note = 2'-O-methyladenosine-3'-phosphate
  modified_base 11: mod_base = OTHER; note = 2'-O-methylguanosine-3'-phosphate
  modified_base 12: mod_base = OTHER; note = 2'-O-methylguanosine-3'-phosphate
  modified_base 13: mod_base = OTHER; note = 2'-O-methyladenosine-3'-phosphate
  modified_base 14: mod_base = OTHER; note = 2'-deoxy-2'-fluorouridine-3'-phosphate
  modified_base 15: mod_base = OTHER; note = 2'-O-methyluridine-3'-phosphate
  modified_base 16: mod_base = OTHER; note = 2'-deoxy-2'-fluoroadenosine-3'-phosphate
  modified_base 17: mod_base = OTHER; note = 2'-O-methyladenosine-3'-phosphate
  modified_base 18: mod_base = OTHER; note = 2'-O-methyladenosine-3'-phosphate
  modified_base 19: mod_base = OTHER; note = 2'-O-methyladenosine-3'-phosphate
  modified_base 20: mod_base = OTHER; note = 2'-O-methyluridine-3'-phosphate
  modified_base 21: mod_base = OTHER; note = 2'-O-methylguanosine-3'-phosphorothioate
  modified_base 22: mod_base = OTHER; note = 2'-O-methyladenosine-3'-phosphorothioate
  modified_base 23: mod_base = OTHER; note = 2'-O-methylguanosine
tttagagtgaggattaaaatgag

SEQ ID NO: 160 - RNA, 23 nt, synthetic construct
  source 1..23: mol_type = other RNA
  modified_base 1: mod_base = OTHER; note = 2'-O-methyluridine-3'-phosphorothioate 5'-(cis-3,3,5-trimethyl-1,2-dithiolan-4-yl thiophosphate)
  modified_base 2: mod_base = OTHER; note = 2'-deoxy-2'-fluorocytidine-3'-phosphorothioate
  modified_base 3: mod_base = OTHER; note = 2'-O-methyladenosine-3'-phosphate
  modified_base 4: mod_base = OTHER; note = 2'-O-methylcytidine-3'-phosphate
  modified_base 5: mod_base = OTHER; note = 2'-O-methyluridine-3'-phosphate
  modified_base 6: mod_base = OTHER; note = 2'-deoxy-2'-fluorouridine-3'-phosphate
  modified_base 7: mod_base = OTHER; note = 2'-O-methyluridine-3'-phosphate
  modified_base 8: mod_base = OTHER; note = 2'-deoxy-2'-fluoroadenosine-3'-phosphate
  modified_base 9: mod_base = OTHER; note = 2'-deoxy-2'-fluorouridine-3'-phosphate
  modified_base 10: mod_base = OTHER; note = 2'-O-methyluridine-3'-phosphate
  modified_base 11: mod_base = OTHER; note = 2'-O-methylguanosine-3'-phosphate
  modified_base 12: mod_base = OTHER; note = 2'-O-methyladenosine-3'-phosphate
  modified_base 13: mod_base = OTHER; note = 2'-O-methylguanosine-3'-phosphate
  modified_base 14: mod_base = OTHER; note = 2'-deoxy-2'-fluorouridine-3'-phosphate
  modified_base 15: mod_base = OTHER; note = 2'-O-methyluridine-3'-phosphate
  modified_base 16: mod_base = OTHER; note = 2'-deoxy-2'-fluorouridine-3'-phosphate
  modified_base 17: mod_base = OTHER; note = 2'-O-methylcytidine-3'-phosphate
  modified_base 18: mod_base = OTHER; note = 2'-O-methyluridine-3'-phosphate
  modified_base 19: mod_base = OTHER; note = 2'-O-methylguanosine-3'-phosphate
  modified_base 20: mod_base = OTHER; note = 2'-O-methyluridine-3'-phosphate
  modified_base 21: mod_base = OTHER; note = 2'-O-methylguanosine-3'-phosphorothioate
  modified_base 22: mod_base = OTHER; note = 2'-O-methylcytidine-3'-phosphorothioate
  modified_base 23: mod_base = OTHER; note = 2'-O-methylcytidine
tcactttattgagtttctgtgcc

SEQ ID NO: 161 - RNA, 23 nt, synthetic construct
  source 1..23: mol_type = other RNA
  modified_base 1: mod_base = OTHER; note = 2'-O-methyluridine-3'-phosphorothioate 5'-(trans-3,3,5-trimethyl-1,2-dithiolan-4-yl thiophosphate)
  modified_base 2: mod_base = OTHER; note = 2'-deoxy-2'-fluorocytidine-3'-phosphorothioate
  modified_base 3: mod_base = OTHER; note = 2'-O-methyladenosine-3'-phosphate
  modified_base 4: mod_base = OTHER; note = 2'-O-methylcytidine-3'-phosphate
  modified_base 5: mod_base = OTHER; note = 2'-O-methyluridine-3'-phosphate
  modified_base 6: mod_base = OTHER; note = 2'-deoxy-2'-fluorouridine-3'-phosphate
  modified_base 7: mod_base = OTHER; note = 2'-O-methyluridine-3'-phosphate
  modified_base 8: mod_base = OTHER; note = 2'-deoxy-2'-fluoroadenosine-3'-phosphate
  modified_base 9: mod_base = OTHER; note = 2'-deoxy-2'-fluorouridine-3'-phosphate
  modified_base 10: mod_base = OTHER; note = 2'-O-methyluridine-3'-phosphate
  modified_base 11: mod_base = OTHER; note = 2'-O-methylguanosine-3'-phosphate
  modified_base 12: mod_base = OTHER; note = 2'-O-methyladenosine-3'-phosphate
  modified_base 13: mod_base = OTHER; note = 2'-O-methylguanosine-3'-phosphate
  modified_base 14: mod_base = OTHER; note = 2'-deoxy-2'-fluorouridine-3'-phosphate
  modified_base 15: mod_base = OTHER; note = 2'-O-methyluridine-3'-phosphate
  modified_base 16: mod_base = OTHER; note = 2'-deoxy-2'-fluorouridine-3'-phosphate
  modified_base 17: mod_base = OTHER; note = 2'-O-methylcytidine-3'-phosphate
  modified_base 18: mod_base = OTHER; note = 2'-O-methyluridine-3'-phosphate
  modified_base 19: mod_base = OTHER; note = 2'-O-methylguanosine-3'-phosphate
  modified_base 20: mod_base = OTHER; note = 2'-O-methyluridine-3'-phosphate
  modified_base 21: mod_base = OTHER; note = 2'-O-methylguanosine-3'-phosphorothioate
  modified_base 22: mod_base = OTHER; note = 2'-O-methylcytidine-3'-phosphorothioate
  modified_base 23: mod_base = OTHER; note = 2'-O-methylcytidine
tcactttattgagtttctgtgcc

SEQ ID NO: 162 - RNA, 23 nt, synthetic construct
  source 1..23: mol_type = other RNA
  modified_base 1: mod_base = OTHER; note = 2'-O-methyluridine-3'-phosphorothioate 5'-(3,3,5S-trimethyl-1,2-dithiolan-4R-yl thiophosphate)
  modified_base 2: mod_base = OTHER; note = 2'-deoxy-2'-fluorocytidine-3'-phosphorothioate
  modified_base 3: mod_base = OTHER; note = 2'-O-methyladenosine-3'-phosphate
  modified_base 4: mod_base = OTHER; note = 2'-O-methylcytidine-3'-phosphate
  modified_base 5: mod_base = OTHER; note = 2'-O-methyluridine-3'-phosphate
  modified_base 6: mod_base = OTHER; note = 2'-deoxy-2'-fluorouridine-3'-phosphate
  modified_base 7: mod_base = OTHER; note = 2'-O-methyluridine-3'-phosphate
  modified_base 8: mod_base = OTHER; note = 2'-deoxy-2'-fluoroadenosine-3'-phosphate
  modified_base 9: mod_base = OTHER; note = 2'-deoxy-2'-fluorouridine-3'-phosphate
  modified_base 10: mod_base = OTHER; note = 2'-O-methyluridine-3'-phosphate
  modified_base 11: mod_base = OTHER; note = 2'-O-methylguanosine-3'-phosphate
  modified_base 12: mod_base = OTHER; note = 2'-O-methyladenosine-3'-phosphate
  modified_base 13: mod_base = OTHER; note = 2'-O-methylguanosine-3'-phosphate
  modified_base 14: mod_base = OTHER; note = 2'-deoxy-2'-fluorouridine-3'-phosphate
  modified_base 15: mod_base = OTHER; note = 2'-O-methyluridine-3'-phosphate
  modified_base 16: mod_base = OTHER; note = 2'-deoxy-2'-fluorouridine-3'-phosphate
  modified_base 17: mod_base = OTHER; note = 2'-O-methylcytidine-3'-phosphate
  modified_base 18: mod_base = OTHER; note = 2'-O-methyluridine-3'-phosphate
  modified_base 19: mod_base = OTHER; note = 2'-O-methylguanosine-3'-phosphate
  modified_base 20: mod_base = OTHER; note = 2'-O-methyluridine-3'-phosphate
  modified_base 21: mod_base = OTHER; note = 2'-O-methylguanosine-3'-phosphorothioate
  modified_base 22: mod_base = OTHER; note = 2'-O-methylcytidine-3'-phosphorothioate
  modified_base 23: mod_base = OTHER; note = 2'-O-methylcytidine
tcactttattgagtttctgtgcc

SEQ ID NO: 163 - RNA, 23 nt, synthetic construct
  source 1..23: mol_type = other RNA
  modified_base 1: mod_base = OTHER; note = 2'-O-methyluridine-3'-phosphorothioate 5'-(3,3,5R-trimethyl-1,2-dithiolan-4S-yl thiophosphate)
  modified_base 2: mod_base = OTHER; note = 2'-deoxy-2'-fluorocytidine-3'-phosphorothioate
  modified_base 3: mod_base = OTHER; note = 2'-O-methyladenosine-3'-phosphate
  modified_base 4: mod_base = OTHER; note = 2'-O-methylcytidine-3'-phosphate
  modified_base 5: mod_base = OTHER; note = 2'-O-methyluridine-3'-phosphate
  modified_base 6: mod_base = OTHER; note = 2'-deoxy-2'-fluorouridine-3'-phosphate
  modified_base 7: mod_base = OTHER; note = 2'-O-methyluridine-3'-phosphate
  modified_base 8: mod_base = OTHER; note = 2'-deoxy-2'-fluoroadenosine-3'-phosphate
  modified_base 9: mod_base = OTHER; note = 2'-deoxy-2'-fluorouridine-3'-phosphate
  modified_base 10: mod_base = OTHER; note = 2'-O-methyluridine-3'-phosphate
  modified_base 11: mod_base = OTHER; note = 2'-O-methylguanosine-3'-phosphate
  modified_base 12: mod_base = OTHER; note = 2'-O-methyladenosine-3'-phosphate
  modified_base 13: mod_base = OTHER; note = 2'-O-methylguanosine-3'-phosphate
  modified_base 14: mod_base = OTHER; note = 2'-deoxy-2'-fluorouridine-3'-phosphate
  modified_base 15: mod_base = OTHER; note = 2'-O-methyluridine-3'-phosphate
  modified_base 16: mod_base = OTHER; note = 2'-deoxy-2'-fluorouridine-3'-phosphate
  modified_base 17: mod_base = OTHER; note = 2'-O-methylcytidine-3'-phosphate
  modified_base 18: mod_base = OTHER; note = 2'-O-methyluridine-3'-phosphate
  modified_base 19: mod_base = OTHER; note = 2'-O-methylguanosine-3'-phosphate
  modified_base 20: mod_base = OTHER; note = 2'-O-methyluridine-3'-phosphate
  modified_base 21: mod_base = OTHER; note = 2'-O-methylguanosine-3'-phosphorothioate
  modified_base 22: mod_base = OTHER; note = 2'-O-methylcytidine-3'-phosphorothioate
  modified_base 23: mod_base = OTHER; note = 2'-O-methylcytidine
tcactttattgagtttctgtgcc

SEQ ID NO: 164 - RNA, 23 nt, synthetic construct
  source 1..23: mol_type = other RNA
  modified_base 1: mod_base = OTHER; note = 2'-O-methyluridine-3'-phosphorothioate 5'-(3,3,5R-trimethyl-1,2-dithiolan-4R-yl thiophosphate)
  modified_base 2: mod_base = OTHER; note = 2'-deoxy-2'-fluorocytidine-3'-phosphorothioate
  modified_base 3: mod_base = OTHER; note = 2'-O-methyladenosine-3'-phosphate
  modified_base 4: mod_base = OTHER; note = 2'-O-methylcytidine-3'-phosphate
  modified_base 5: mod_base = OTHER; note = 2'-O-methyluridine-3'-phosphate
  modified_base 6: mod_base = OTHER; note = 2'-deoxy-2'-fluorouridine-3'-phosphate
  modified_base 7: mod_base = OTHER; note = 2'-O-methyluridine-3'-phosphate
  modified_base 8: mod_base = OTHER; note = 2'-deoxy-2'-fluoroadenosine-3'-phosphate
  modified_base 9: mod_base = OTHER; note = 2'-deoxy-2'-fluorouridine-3'-phosphate
  modified_base 10: mod_base = OTHER; note = 2'-O-methyluridine-3'-phosphate
  modified_base 11: mod_base = OTHER; note = 2'-O-methylguanosine-3'-phosphate
  modified_base 12: mod_base = OTHER; note = 2'-O-methyladenosine-3'-phosphate
  modified_base 13: mod_base = OTHER; note = 2'-O-methylguanosine-3'-phosphate
  modified_base 14: mod_base = OTHER; note = 2'-deoxy-2'-fluorouridine-3'-phosphate
  modified_base 15: mod_base = OTHER; note = 2'-O-methyluridine-3'-phosphate
  modified_base 16: mod_base = OTHER; note = 2'-deoxy-2'-fluorouridine-3'-phosphate
  modified_base 17: mod_base = OTHER; note = 2'-O-methylcytidine-3'-phosphate
  modified_base 18: mod_base = OTHER; note = 2'-O-methyluridine-3'-phosphate
  modified_base 19: mod_base = OTHER; note = 2'-O-methylguanosine-3'-phosphate
  modified_base 20: mod_base = OTHER; note = 2'-O-methyluridine-3'-phosphate
  modified_base 21: mod_base = OTHER; note = 2'-O-methylguanosine-3'-phosphorothioate
  modified_base 22: mod_base = OTHER; note = 2'-O-methylcytidine-3'-phosphorothioate
  modified_base 23: mod_base = OTHER; note = 2'-O-methylcytidine
tcactttattgagtttctgtgcc

SEQ ID NO: 165 - RNA, 23 nt, synthetic construct
  source 1..23: mol_type = other RNA
  modified_base 1: mod_base = OTHER; note = 2'-O-methyluridine-3'-phosphorothioate 5'-(3,3,5S-trimethyl-1,2-dithiolan-4S-yl thiophosphate)
  modified_base 2: mod_base = OTHER; note = 2'-deoxy-2'-fluorocytidine-3'-phosphorothioate
  modified_base 3: mod_base = OTHER; note = 2'-O-methyladenosine-3'-phosphate
  modified_base 4: mod_base = OTHER; note = 2'-O-methylcytidine-3'-phosphate
  modified_base 5: mod_base = OTHER; note = 2'-O-methyluridine-3'-phosphate
  modified_base 6: mod_base = OTHER; note = 2'-deoxy-2'-fluorouridine-3'-phosphate
  modified_base 7: mod_base = OTHER; note = 2'-O-methyluridine-3'-phosphate
  modified_base 8: mod_base = OTHER; note = 2'-deoxy-2'-fluoroadenosine-3'-phosphate
  modified_base 9: mod_base = OTHER; note = 2'-deoxy-2'-fluorouridine-3'-phosphate
  modified_base 10: mod_base = OTHER; note = 2'-O-methyluridine-3'-phosphate
  modified_base 11: mod_base = OTHER; note = 2'-O-methylguanosine-3'-phosphate
  modified_base 12: mod_base = OTHER; note = 2'-O-methyladenosine-3'-phosphate
  modified_base 13: mod_base = OTHER; note = 2'-O-methylguanosine-3'-phosphate
  modified_base 14: mod_base = OTHER; note = 2'-deoxy-2'-fluorouridine-3'-phosphate
  modified_base 15: mod_base = OTHER; note = 2'-O-methyluridine-3'-phosphate
  modified_base 16: mod_base = OTHER; note = 2'-deoxy-2'-fluorouridine-3'-phosphate
  modified_base 17: mod_base = OTHER; note = 2'-O-methylcytidine-3'-phosphate
  modified_base 18: mod_base = OTHER; note = 2'-O-methyluridine-3'-phosphate
  modified_base 19: mod_base = OTHER; note = 2'-O-methylguanosine-3'-phosphate
  modified_base 20: mod_base = OTHER; note = 2'-O-methyluridine-3'-phosphate
  modified_base 21: mod_base = OTHER; note = 2'-O-methylguanosine-3'-phosphorothioate
  modified_base 22: mod_base = OTHER; note = 2'-O-methylcytidine-3'-phosphorothioate
  modified_base 23: mod_base = OTHER; note = 2'-O-methylcytidine
tcactttattgagtttctgtgcc

SEQ ID NO: 166 - RNA, 23 nt, synthetic construct
  source 1..23: mol_type = other RNA
  modified_base 1: mod_base = OTHER; note = 2'-O-methyluridine-3'-phosphorothioate 5'-(cis-5-phenyl-3,3-dimethyl-1,2-dithiolan-4-yl thiophosphate)
  modified_base 2: mod_base = OTHER; note = 2'-deoxy-2'-fluorocytidine-3'-phosphorothioate
  modified_base 3: mod_base = OTHER; note = 2'-O-methyladenosine-3'-phosphate
  modified_base 4: mod_base = OTHER; note = 2'-O-methylcytidine-3'-phosphate
  modified_base 5: mod_base = OTHER; note = 2'-O-methyluridine-3'-phosphate
  modified_base 6: mod_base = OTHER; note = 2'-deoxy-2'-fluorouridine-3'-phosphate
  modified_base 7: mod_base = OTHER; note = 2'-O-methyluridine-3'-phosphate
  modified_base 8: mod_base = OTHER; note = 2'-deoxy-2'-fluoroadenosine-3'-phosphate
  modified_base 9: mod_base = OTHER; note = 2'-deoxy-2'-fluorouridine-3'-phosphate
  modified_base 10: mod_base = OTHER; note = 2'-O-methyluridine-3'-phosphate
  modified_base 11: mod_base = OTHER; note = 2'-O-methylguanosine-3'-phosphate
  modified_base 12: mod_base = OTHER; note = 2'-O-methyladenosine-3'-phosphate
  modified_base 13: mod_base = OTHER; note = 2'-O-methylguanosine-3'-phosphate
  modified_base 14: mod_base = OTHER; note = 2'-deoxy-2'-fluorouridine-3'-phosphate
  modified_base 15: mod_base = OTHER; note = 2'-O-methyluridine-3'-phosphate
  modified_base 16: mod_base = OTHER; note = 2'-deoxy-2'-fluorouridine-3'-phosphate
  modified_base 17: mod_base = OTHER; note = 2'-O-methylcytidine-3'-phosphate
  modified_base 18: mod_base = OTHER; note = 2'-O-methyluridine-3'-phosphate
  modified_base 19: mod_base = OTHER; note = 2'-O-methylguanosine-3'-phosphate
  modified_base 20: mod_base = OTHER; note = 2'-O-methyluridine-3'-phosphate
  modified_base 21: mod_base = OTHER; note = 2'-O-methylguanosine-3'-phosphorothioate
  modified_base 22: mod_base = OTHER; note = 2'-O-methylcytidine-3'-phosphorothioate
  modified_base 23: mod_base = OTHER; note = 2'-O-methylcytidine
tcactttattgagtttctgtgcc

SEQ ID NO: 167 - RNA, 23 nt, synthetic construct
  source 1..23: mol_type = other RNA
  modified_base 1: mod_base = OTHER; note = 2'-O-methyluridine-3'-phosphorothioate 5'-(trans-5-phenyl-3,3-dimethyl-1,2-dithiolan-4-yl thiophosphate)
  modified_base 2: mod_base = OTHER; note = 2'-deoxy-2'-fluorocytidine-3'-phosphorothioate
  modified_base 3: mod_base = OTHER; note = 2'-O-methyladenosine-3'-phosphate
  modified_base 4: mod_base = OTHER; note = 2'-O-methylcytidine-3'-phosphate
  modified_base 5: mod_base = OTHER; note = 2'-O-methyluridine-3'-phosphate
  modified_base 6: mod_base = OTHER; note = 2'-deoxy-2'-fluorouridine-3'-phosphate
  modified_base 7: mod_base = OTHER; note = 2'-O-methyluridine-3'-phosphate
  modified_base 8: mod_base = OTHER; note = 2'-deoxy-2'-fluoroadenosine-3'-phosphate
  modified_base 9: mod_base = OTHER; note = 2'-deoxy-2'-fluorouridine-3'-phosphate
  modified_base 10: mod_base = OTHER; note = 2'-O-methyluridine-3'-phosphate
  modified_base 11: mod_base = OTHER; note = 2'-O-methylguanosine-3'-phosphate
  modified_base 12: mod_base = OTHER; note = 2'-O-methyladenosine-3'-phosphate
  modified_base 13: mod_base = OTHER; note = 2'-O-methylguanosine-3'-phosphate
  modified_base 14: mod_base = OTHER; note = 2'-deoxy-2'-fluorouridine-3'-phosphate
  modified_base 15: mod_base = OTHER; note = 2'-O-methyluridine-3'-phosphate
  modified_base 16: mod_base = OTHER; note = 2'-deoxy-2'-fluorouridine-3'-phosphate
  modified_base 17: mod_base = OTHER; note = 2'-O-methylcytidine-3'-phosphate
  modified_base 18: mod_base = OTHER; note = 2'-O-methyluridine-3'-phosphate
  modified_base 19: mod_base = OTHER; note = 2'-O-methylguanosine-3'-phosphate
  modified_base 20: mod_base = OTHER; note = 2'-O-methyluridine-3'-phosphate
  modified_base 21: mod_base = OTHER; note = 2'-O-methylguanosine-3'-phosphorothioate
  modified_base 22: mod_base = OTHER; note = 2'-O-methylcytidine-3'-phosphorothioate
  modified_base 23: mod_base = OTHER; note = 2'-O-methylcytidine
tcactttattgagtttctgtgcc

SEQ ID NO: 168 - RNA, 23 nt, synthetic construct
  source 1..23: mol_type = other RNA
  modified_base 1: mod_base = OTHER; note = 2'-O-methyluridine-3'-phosphorothioate 5'-(cis-5-(4-methylphenyl)-3,3-dimethyl-1,2-dithiolan-4-yl thiophosphate)
  modified_base 2: mod_base = OTHER; note = 2'-deoxy-2'-fluorocytidine-3'-phosphorothioate
  modified_base 3: mod_base = OTHER; note = 2'-O-methyladenosine-3'-phosphate
  modified_base 4: mod_base = OTHER; note = 2'-O-methylcytidine-3'-phosphate
  modified_base 5: mod_base = OTHER; note = 2'-O-methyluridine-3'-phosphate
  modified_base 6: mod_base = OTHER; note = 2'-deoxy-2'-fluorouridine-3'-phosphate
  modified_base 7: mod_base = OTHER; note = 2'-O-methyluridine-3'-phosphate
  modified_base 8: mod_base = OTHER; note = 2'-deoxy-2'-fluoroadenosine-3'-phosphate
  modified_base 9: mod_base = OTHER; note = 2'-deoxy-2'-fluorouridine-3'-phosphate
  modified_base 10: mod_base = OTHER; note = 2'-O-methyluridine-3'-phosphate
  modified_base 11: mod_base = OTHER; note = 2'-O-methylguanosine-3'-phosphate
  modified_base 12: mod_base = OTHER; note = 2'-O-methyladenosine-3'-phosphate
  modified_base 13: mod_base = OTHER; note = 2'-O-methylguanosine-3'-phosphate
  modified_base 14: mod_base = OTHER; note = 2'-deoxy-2'-fluorouridine-3'-phosphate
  modified_base 15: mod_base = OTHER; note = 2'-O-methyluridine-3'-phosphate
  modified_base 16: mod_base = OTHER; note = 2'-deoxy-2'-fluorouridine-3'-phosphate
  modified_base 17: mod_base = OTHER; note = 2'-O-methylcytidine-3'-phosphate
  modified_base 18: mod_base = OTHER; note = 2'-O-methyluridine-3'-phosphate
  modified_base 19: mod_base = OTHER; note = 2'-O-methylguanosine-3'-phosphate
  modified_base 20: mod_base = OTHER; note = 2'-O-methyluridine-3'-phosphate
  modified_base 21: mod_base = OTHER; note = 2'-O-methylguanosine-3'-phosphorothioate
  modified_base 22: mod_base = OTHER; note = 2'-O-methylcytidine-3'-phosphorothioate
  modified_base 23: mod_base = OTHER; note = 2'-O-methylcytidine
tcactttattgagtttctgtgcc

SEQ ID NO: 169 - RNA, 23 nt, synthetic construct
  source 1..23: mol_type = other RNA
  modified_base 1: mod_base = OTHER; note = 2'-O-methyluridine-3'-phosphorothioate 5'-(trans-5-(4-methylphenyl)-3,3-dimethyl-1,2-dithiolan-4-y l thiophosphate)
  modified_base 2: mod_base = OTHER; note = 2'-deoxy-2'-fluorocytidine-3'-phosphorothioate
  modified_base 3: mod_base = OTHER; note = 2'-O-methyladenosine-3'-phosphate
  modified_base 4: mod_base = OTHER; note = 2'-O-methylcytidine-3'-phosphate
  modified_base 5: mod_base = OTHER; note = 2'-O-methyluridine-3'-phosphate
  modified_base 6: mod_base = OTHER; note = 2'-deoxy-2'-fluorouridine-3'-phosphate
  modified_base 7: mod_base = OTHER; note = 2'-O-methyluridine-3'-phosphate
  modified_base 8: mod_base = OTHER; note = 2'-deoxy-2'-fluoroadenosine-3'-phosphate
  modified_base 9: mod_base = OTHER; note = 2'-deoxy-2'-fluorouridine-3'-phosphate
  modified_base 10: mod_base = OTHER; note = 2'-O-methyluridine-3'-phosphate
  modified_base 11: mod_base = OTHER; note = 2'-O-methylguanosine-3'-phosphate
  modified_base 12: mod_base = OTHER; note = 2'-O-methyladenosine-3'-phosphate
  modified_base 13: mod_base = OTHER; note = 2'-O-methylguanosine-3'-phosphate
  modified_base 14: mod_base = OTHER; note = 2'-deoxy-2'-fluorouridine-3'-phosphate
  modified_base 15: mod_base = OTHER; note = 2'-O-methyluridine-3'-phosphate
  modified_base 16: mod_base = OTHER; note = 2'-deoxy-2'-fluorouridine-3'-phosphate
  modified_base 17: mod_base = OTHER; note = 2'-O-methylcytidine-3'-phosphate
  modified_base 18: mod_base = OTHER; note = 2'-O-methyluridine-3'-phosphate
  modified_base 19: mod_base = OTHER; note = 2'-O-methylguanosine-3'-phosphate
  modified_base 20: mod_base = OTHER; note = 2'-O-methyluridine-3'-phosphate
  modified_base 21: mod_base = OTHER; note = 2'-O-methylguanosine-3'-phosphorothioate
  modified_base 22: mod_base = OTHER; note = 2'-O-methylcytidine-3'-phosphorothioate
  modified_base 23: mod_base = OTHER; note = 2'-O-methylcytidine
tcactttattgagtttctgtgcc

SEQ ID NO: 170 - RNA, 23 nt, synthetic construct
  source 1..23: mol_type = other RNA
  modified_base 1: mod_base = OTHER; note = 2'-O-methyluridine-3'-phosphorothioate 5'-(cis-5-(4-methoxyphenyl)-3,3-dimethyl-1,2-dithiolan-4-yl thiophosphate)
  modified_base 2: mod_base = OTHER; note = 2'-deoxy-2'-fluorocytidine-3'-phosphorothioate
  modified_base 3: mod_base = OTHER; note = 2'-O-methyladenosine-3'-phosphate
  modified_base 4: mod_base = OTHER; note = 2'-O-methylcytidine-3'-phosphate
  modified_base 5: mod_base = OTHER; note = 2'-O-methyluridine-3'-phosphate
  modified_base 6: mod_base = OTHER; note = 2'-deoxy-2'-fluorouridine-3'-phosphate
  modified_base 7: mod_base = OTHER; note = 2'-O-methyluridine-3'-phosphate
  modified_base 8: mod_base = OTHER; note = 2'-deoxy-2'-fluoroadenosine-3'-phosphate
  modified_base 9: mod_base = OTHER; note = 2'-deoxy-2'-fluorouridine-3'-phosphate
  modified_base 10: mod_base = OTHER; note = 2'-O-methyluridine-3'-phosphate
  modified_base 11: mod_base = OTHER; note = 2'-O-methylguanosine-3'-phosphate
  modified_base 12: mod_base = OTHER; note = 2'-O-methyladenosine-3'-phosphate
  modified_base 13: mod_base = OTHER; note = 2'-O-methylguanosine-3'-phosphate
  modified_base 14: mod_base = OTHER; note = 2'-deoxy-2'-fluorouridine-3'-phosphate
  modified_base 15: mod_base = OTHER; note = 2'-O-methyluridine-3'-phosphate
  modified_base 16: mod_base = OTHER; note = 2'-deoxy-2'-fluorouridine-3'-phosphate
  modified_base 17: mod_base = OTHER; note = 2'-O-methylcytidine-3'-phosphate
  modified_base 18: mod_base = OTHER; note = 2'-O-methyluridine-3'-phosphate
  modified_base 19: mod_base = OTHER; note = 2'-O-methylguanosine-3'-phosphate
  modified_base 20: mod_base = OTHER; note = 2'-O-methyluridine-3'-phosphate
  modified_base 21: mod_base = OTHER; note = 2'-O-methylguanosine-3'-phosphorothioate
  modified_base 22: mod_base = OTHER; note = 2'-O-methylcytidine-3'-phosphorothioate
  modified_base 23: mod_base = OTHER; note = 2'-O-methylcytidine
tcactttattgagtttctgtgcc

SEQ ID NO: 171 - RNA, 23 nt, synthetic construct
  source 1..23: mol_type = other RNA
  modified_base 1: mod_base = OTHER; note = 2'-O-methyluridine-3'-phosphorothioate 5'-(trans-5-(4-methoxyphenyl)-3,3-dimethyl-1,2-dithiolan-4- yl thiophosphate)
  modified_base 2: mod_base = OTHER; note = 2'-deoxy-2'-fluorocytidine-3'-phosphorothioate
  modified_base 3: mod_base = OTHER; note = 2'-O-methyladenosine-3'-phosphate
  modified_base 4: mod_base = OTHER; note = 2'-O-methylcytidine-3'-phosphate
  modified_base 5: mod_base = OTHER; note = 2'-O-methyluridine-3'-phosphate
  modified_base 6: mod_base = OTHER; note = 2'-deoxy-2'-fluorouridine-3'-phosphate
  modified_base 7: mod_base = OTHER; note = 2'-O-methyluridine-3'-phosphate
  modified_base 8: mod_base = OTHER; note = 2'-deoxy-2'-fluoroadenosine-3'-phosphate
  modified_base 9: mod_base = OTHER; note = 2'-deoxy-2'-fluorouridine-3'-phosphate
  modified_base 10: mod_base = OTHER; note = 2'-O-methyluridine-3'-phosphate
  modified_base 11: mod_base = OTHER; note = 2'-O-methylguanosine-3'-phosphate
  modified_base 12: mod_base = OTHER; note = 2'-O-methyladenosine-3'-phosphate
  modified_base 13: mod_base = OTHER; note = 2'-O-methylguanosine-3'-phosphate
  modified_base 14: mod_base = OTHER; note = 2'-deoxy-2'-fluorouridine-3'-phosphate
  modified_base 15: mod_base = OTHER; note = 2'-O-methyluridine-3'-phosphate
  modified_base 16: mod_base = OTHER; note = 2'-deoxy-2'-fluorouridine-3'-phosphate
  modified_base 17: mod_base = OTHER; note = 2'-O-methylcytidine-3'-phosphate
  modified_base 18: mod_base = OTHER; note = 2'-O-methyluridine-3'-phosphate
  modified_base 19: mod_base = OTHER; note = 2'-O-methylguanosine-3'-phosphate
  modified_base 20: mod_base = OTHER; note = 2'-O-methyluridine-3'-phosphate
  modified_base 21: mod_base = OTHER; note = 2'-O-methylguanosine-3'-phosphorothioate
  modified_base 22: mod_base = OTHER; note = 2'-O-methylcytidine-3'-phosphorothioate
  modified_base 23: mod_base = OTHER; note = 2'-O-methylcytidine
tcactttattgagtttctgtgcc

SEQ ID NO: 172 - RNA, 23 nt, synthetic construct
  source 1..23: mol_type = other RNA
  modified_base 1: mod_base = OTHER; note = 2'-O-methyluridine-3'-phosphorothioate 5'-(cis-5-(4-bromophenyl)-3,3-dimethyl-1,2-dithiolan-4-yl thiophosphate)
  modified_base 2: mod_base = OTHER; note = 2'-deoxy-2'-fluorocytidine-3'-phosphorothioate
  modified_base 3: mod_base = OTHER; note = 2'-O-methyladenosine-3'-phosphate
  modified_base 4: mod_base = OTHER; note = 2'-O-methylcytidine-3'-phosphate
  modified_base 5: mod_base = OTHER; note = 2'-O-methyluridine-3'-phosphate
  modified_base 6: mod_base = OTHER; note = 2'-deoxy-2'-fluorouridine-3'-phosphate
  modified_base 7: mod_base = OTHER; note = 2'-O-methyluridine-3'-phosphate
  modified_base 8: mod_base = OTHER; note = 2'-deoxy-2'-fluoroadenosine-3'-phosphate
  modified_base 9: mod_base = OTHER; note = 2'-deoxy-2'-fluorouridine-3'-phosphate
  modified_base 10: mod_base = OTHER; note = 2'-O-methyluridine-3'-phosphate
  modified_base 11: mod_base = OTHER; note = 2'-O-methylguanosine-3'-phosphate
  modified_base 12: mod_base = OTHER; note = 2'-O-methyladenosine-3'-phosphate
  modified_base 13: mod_base = OTHER; note = 2'-O-methylguanosine-3'-phosphate
  modified_base 14: mod_base = OTHER; note = 2'-deoxy-2'-fluorouridine-3'-phosphate
  modified_base 15: mod_base = OTHER; note = 2'-O-methyluridine-3'-phosphate
  modified_base 16: mod_base = OTHER; note = 2'-deoxy-2'-fluorouridine-3'-phosphate
  modified_base 17: mod_base = OTHER; note = 2'-O-methylcytidine-3'-phosphate
  modified_base 18: mod_base = OTHER; note = 2'-O-methyluridine-3'-phosphate
  modified_base 19: mod_base = OTHER; note = 2'-O-methylguanosine-3'-phosphate
  modified_base 20: mod_base = OTHER; note = 2'-O-methyluridine-3'-phosphate
  modified_base 21: mod_base = OTHER; note = 2'-O-methylguanosine-3'-phosphorothioate
  modified_base 22: mod_base = OTHER; note = 2'-O-methylcytidine-3'-phosphorothioate
  modified_base 23: mod_base = OTHER; note = 2'-O-methylcytidine
tcactttattgagtttctgtgcc

SEQ ID NO: 173 - RNA, 23 nt, synthetic construct
  source 1..23: mol_type = other RNA
  modified_base 1: mod_base = OTHER; note = 2'-O-methyluridine-3'-phosphorothioate 5'-(cis-5-(4-cyanophenyl)-3,3-dimethyl-1,2-dithiolan-4-yl thiophosphate)
  modified_base 2: mod_base = OTHER; note = 2'-deoxy-2'-fluorocytidine-3'-phosphorothioate
  modified_base 3: mod_base = OTHER; note = 2'-O-methyladenosine-3'-phosphate
  modified_base 4: mod_base = OTHER; note = 2'-O-methylcytidine-3'-phosphate
  modified_base 5: mod_base = OTHER; note = 2'-O-methyluridine-3'-phosphate
  modified_base 6: mod_base = OTHER; note = 2'-deoxy-2'-fluorouridine-3'-phosphate
  modified_base 7: mod_base = OTHER; note = 2'-O-methyluridine-3'-phosphate
  modified_base 8: mod_base = OTHER; note = 2'-deoxy-2'-fluoroadenosine-3'-phosphate
  modified_base 9: mod_base = OTHER; note = 2'-deoxy-2'-fluorouridine-3'-phosphate
  modified_base 10: mod_base = OTHER; note = 2'-O-methyluridine-3'-phosphate
  modified_base 11: mod_base = OTHER; note = 2'-O-methylguanosine-3'-phosphate
  modified_base 12: mod_base = OTHER; note = 2'-O-methyladenosine-3'-phosphate
  modified_base 13: mod_base = OTHER; note = 2'-O-methylguanosine-3'-phosphate
  modified_base 14: mod_base = OTHER; note = 2'-deoxy-2'-fluorouridine-3'-phosphate
  modified_base 15: mod_base = OTHER; note = 2'-O-methyluridine-3'-phosphate
  modified_base 16: mod_base = OTHER; note = 2'-deoxy-2'-fluorouridine-3'-phosphate
  modified_base 17: mod_base = OTHER; note = 2'-O-methylcytidine-3'-phosphate
  modified_base 18: mod_base = OTHER; note = 2'-O-methyluridine-3'-phosphate
  modified_base 19: mod_base = OTHER; note = 2'-O-methylguanosine-3'-phosphate
  modified_base 20: mod_base = OTHER; note = 2'-O-methyluridine-3'-phosphate
  modified_base 21: mod_base = OTHER; note = 2'-O-methylguanosine-3'-phosphorothioate
  modified_base 22: mod_base = OTHER; note = 2'-O-methylcytidine-3'-phosphorothioate
  modified_base 23: mod_base = OTHER; note = 2'-O-methylcytidine
tcactttattgagtttctgtgcc

SEQ ID NO: 174 - RNA, 23 nt, synthetic construct
  source 1..23: mol_type = other RNA
  modified_base 1: mod_base = OTHER; note = 2'-O-methyluridine-3'-phosphorothioate 5'-(cis-5-(4-fluorophenyl)-3,3-dimethyl-1,2-dithiolan-4-yl thiophosphate)
  modified_base 2: mod_base = OTHER; note = 2'-deoxy-2'-fluorocytidine-3'-phosphorothioate
  modified_base 3: mod_base = OTHER; note = 2'-O-methyladenosine-3'-phosphate
  modified_base 4: mod_base = OTHER; note = 2'-O-methylcytidine-3'-phosphate
  modified_base 5: mod_base = OTHER; note = 2'-O-methyluridine-3'-phosphate
  modified_base 6: mod_base = OTHER; note = 2'-deoxy-2'-fluorouridine-3'-phosphate
  modified_base 7: mod_base = OTHER; note = 2'-O-methyluridine-3'-phosphate
  modified_base 8: mod_base = OTHER; note = 2'-deoxy-2'-fluoroadenosine-3'-phosphate
  modified_base 9: mod_base = OTHER; note = 2'-deoxy-2'-fluorouridine-3'-phosphate
  modified_base 10: mod_base = OTHER; note = 2'-O-methyluridine-3'-phosphate
  modified_base 11: mod_base = OTHER; note = 2'-O-methylguanosine-3'-phosphate
  modified_base 12: mod_base = OTHER; note = 2'-O-methyladenosine-3'-phosphate
  modified_base 13: mod_base = OTHER; note = 2'-O-methylguanosine-3'-phosphate
  modified_base 14: mod_base = OTHER; note = 2'-deoxy-2'-fluorouridine-3'-phosphate
  modified_base 15: mod_base = OTHER; note = 2'-O-methyluridine-3'-phosphate
  modified_base 16: mod_base = OTHER; note = 2'-deoxy-2'-fluorouridine-3'-phosphate
  modified_base 17: mod_base = OTHER; note = 2'-O-methylcytidine-3'-phosphate
  modified_base 18: mod_base = OTHER; note = 2'-O-methyluridine-3'-phosphate
  modified_base 19: mod_base = OTHER; note = 2'-O-methylguanosine-3'-phosphate
  modified_base 20: mod_base = OTHER; note = 2'-O-methyluridine-3'-phosphate
  modified_base 21: mod_base = OTHER; note = 2'-O-methylguanosine-3'-phosphorothioate
  modified_base 22: mod_base = OTHER; note = 2'-O-methylcytidine-3'-phosphorothioate
  modified_base 23: mod_base = OTHER; note = 2'-O-methylcytidine
tcactttattgagtttctgtgcc

SEQ ID NO: 175 - RNA, 23 nt, synthetic construct
  source 1..23: mol_type = other RNA
  modified_base 1: mod_base = OTHER; note = 2'-O-methyluridine-3'-phosphorothioate 5'-(cis-5-(benzo[1,3]dioxol-6-yl)-3,3-dimethyl-1,2-dithiola n-4-yl thiophosphate)
  modified_base 2: mod_base = OTHER; note = 2'-deoxy-2'-fluorocytidine-3'-phosphorothioate
  modified_base 3: mod_base = OTHER; note = 2'-O-methyladenosine-3'-phosphate
  modified_base 4: mod_base = OTHER; note = 2'-O-methylcytidine-3'-phosphate
  modified_base 5: mod_base = OTHER; note = 2'-O-methyluridine-3'-phosphate
  modified_base 6: mod_base = OTHER; note = 2'-deoxy-2'-fluorouridine-3'-phosphate
  modified_base 7: mod_base = OTHER; note = 2'-O-methyluridine-3'-phosphate
  modified_base 8: mod_base = OTHER; note = 2'-deoxy-2'-fluoroadenosine-3'-phosphate
  modified_base 9: mod_base = OTHER; note = 2'-deoxy-2'-fluorouridine-3'-phosphate
  modified_base 10: mod_base = OTHER; note = 2'-O-methyluridine-3'-phosphate
  modified_base 11: mod_base = OTHER; note = 2'-O-methylguanosine-3'-phosphate
  modified_base 12: mod_base = OTHER; note = 2'-O-methyladenosine-3'-phosphate
  modified_base 13: mod_base = OTHER; note = 2'-O-methylguanosine-3'-phosphate
  modified_base 14: mod_base = OTHER; note = 2'-deoxy-2'-fluorouridine-3'-phosphate
  modified_base 15: mod_base = OTHER; note = 2'-O-methyluridine-3'-phosphate
  modified_base 16: mod_base = OTHER; note = 2'-deoxy-2'-fluorouridine-3'-phosphate
  modified_base 17: mod_base = OTHER; note = 2'-O-methylcytidine-3'-phosphate
  modified_base 18: mod_base = OTHER; note = 2'-O-methyluridine-3'-phosphate
  modified_base 19: mod_base = OTHER; note = 2'-O-methylguanosine-3'-phosphate
  modified_base 20: mod_base = OTHER; note = 2'-O-methyluridine-3'-phosphate
  modified_base 21: mod_base = OTHER; note = 2'-O-methylguanosine-3'-phosphorothioate
  modified_base 22: mod_base = OTHER; note = 2'-O-methylcytidine-3'-phosphorothioate
  modified_base 23: mod_base = OTHER; note = 2'-O-methylcytidine
tcactttattgagtttctgtgcc

SEQ ID NO: 176 - RNA, 23 nt, synthetic construct
  source 1..23: mol_type = other RNA
  modified_base 1: mod_base = OTHER; note = 2'-O-methyluridine-3'-phosphorothioate 5'-(cis-5-(2-methylphenyl)-3,3-dimethyl-1,2-dithiolan-4-yl thiophosphate)
  modified_base 2: mod_base = OTHER; note = 2'-deoxy-2'-fluorocytidine-3'-phosphorothioate
  modified_base 3: mod_base = OTHER; note = 2'-O-methyladenosine-3'-phosphate
  modified_base 4: mod_base = OTHER; note = 2'-O-methylcytidine-3'-phosphate
  modified_base 5: mod_base = OTHER; note = 2'-O-methyluridine-3'-phosphate
  modified_base 6: mod_base = OTHER; note = 2'-deoxy-2'-fluorouridine-3'-phosphate
  modified_base 7: mod_base = OTHER; note = 2'-O-methyluridine-3'-phosphate
  modified_base 8: mod_base = OTHER; note = 2'-deoxy-2'-fluoroadenosine-3'-phosphate
  modified_base 9: mod_base = OTHER; note = 2'-deoxy-2'-fluorouridine-3'-phosphate
  modified_base 10: mod_base = OTHER; note = 2'-O-methyluridine-3'-phosphate
  modified_base 11: mod_base = OTHER; note = 2'-O-methylguanosine-3'-phosphate
  modified_base 12: mod_base = OTHER; note = 2'-O-methyladenosine-3'-phosphate
  modified_base 13: mod_base = OTHER; note = 2'-O-methylguanosine-3'-phosphate
  modified_base 14: mod_base = OTHER; note = 2'-deoxy-2'-fluorouridine-3'-phosphate
  modified_base 15: mod_base = OTHER; note = 2'-O-methyluridine-3'-phosphate
  modified_base 16: mod_base = OTHER; note = 2'-deoxy-2'-fluorouridine-3'-phosphate
  modified_base 17: mod_base = OTHER; note = 2'-O-methylcytidine-3'-phosphate
  modified_base 18: mod_base = OTHER; note = 2'-O-methyluridine-3'-phosphate
  modified_base 19: mod_base = OTHER; note = 2'-O-methylguanosine-3'-phosphate
  modified_base 20: mod_base = OTHER; note = 2'-O-methyluridine-3'-phosphate
  modified_base 21: mod_base = OTHER; note = 2'-O-methylguanosine-3'-phosphorothioate
  modified_base 22: mod_base = OTHER; note = 2'-O-methylcytidine-3'-phosphorothioate
  modified_base 23: mod_base = OTHER; note = 2'-O-methylcytidine
tcactttattgagtttctgtgcc

SEQ ID NO: 177 - RNA, 23 nt, synthetic construct
  source 1..23: mol_type = other RNA
  modified_base 1: mod_base = OTHER; note = 2'-O-methyluridine-3'-phosphorothioate 5'-(cis-5-(2-methoxyphenyl)-3,3-dimethyl-1,2-dithiolan-4-yl thiophosphate)
  modified_base 2: mod_base = OTHER; note = 2'-deoxy-2'-fluorocytidine-3'-phosphorothioate
  modified_base 3: mod_base = OTHER; note = 2'-O-methyladenosine-3'-phosphate
  modified_base 4: mod_base = OTHER; note = 2'-O-methylcytidine-3'-phosphate
  modified_base 5: mod_base = OTHER; note = 2'-O-methyluridine-3'-phosphate
  modified_base 6: mod_base = OTHER; note = 2'-deoxy-2'-fluorouridine-3'-phosphate
  modified_base 7: mod_base = OTHER; note = 2'-O-methyluridine-3'-phosphate
  modified_base 8: mod_base = OTHER; note = 2'-deoxy-2'-fluoroadenosine-3'-phosphate
  modified_base 9: mod_base = OTHER; note = 2'-deoxy-2'-fluorouridine-3'-phosphate
  modified_base 10: mod_base = OTHER; note = 2'-O-methyluridine-3'-phosphate
  modified_base 11: mod_base = OTHER; note = 2'-O-methylguanosine-3'-phosphate
  modified_base 12: mod_base = OTHER; note = 2'-O-methyladenosine-3'-phosphate
  modified_base 13: mod_base = OTHER; note = 2'-O-methylguanosine-3'-phosphate
  modified_base 14: mod_base = OTHER; note = 2'-deoxy-2'-fluorouridine-3'-phosphate
  modified_base 15: mod_base = OTHER; note = 2'-O-methyluridine-3'-phosphate
  modified_base 16: mod_base = OTHER; note = 2'-deoxy-2'-fluorouridine-3'-phosphate
  modified_base 17: mod_base = OTHER; note = 2'-O-methylcytidine-3'-phosphate
  modified_base 18: mod_base = OTHER; note = 2'-O-methyluridine-3'-phosphate
  modified_base 19: mod_base = OTHER; note = 2'-O-methylguanosine-3'-phosphate
  modified_base 20: mod_base = OTHER; note = 2'-O-methyluridine-3'-phosphate
  modified_base 21: mod_base = OTHER; note = 2'-O-methylguanosine-3'-phosphorothioate
  modified_base 22: mod_base = OTHER; note = 2'-O-methylcytidine-3'-phosphorothioate
  modified_base 23: mod_base = OTHER; note = 2'-O-methylcytidine
tcactttattgagtttctgtgcc

SEQ ID NO: 178 - RNA, 23 nt, synthetic construct
  source 1..23: mol_type = other RNA
  modified_base 1: mod_base = OTHER; note = 2'-O-methyluridine-3'-phosphorothioate 5'-((cis-3,3,5-trimethyl-1,2-dithiolan-4-yl) (1,3-dimethylimidazolidin-2-ylidene)phosphoramidate)
  modified_base 2: mod_base = OTHER; note = 2'-deoxy-2'-fluorocytidine-3'-phosphorothioate
  modified_base 3: mod_base = OTHER; note = 2'-O-methyladenosine-3'-phosphate
  modified_base 4: mod_base = OTHER; note = 2'-O-methylcytidine-3'-phosphate
  modified_base 5: mod_base = OTHER; note = 2'-O-methyluridine-3'-phosphate
  modified_base 6: mod_base = OTHER; note = 2'-deoxy-2'-fluorouridine-3'-phosphate
  modified_base 7: mod_base = OTHER; note = 2'-O-methyluridine-3'-phosphate
  modified_base 8: mod_base = OTHER; note = 2'-deoxy-2'-fluoroadenosine-3'-phosphate
  modified_base 9: mod_base = OTHER; note = 2'-deoxy-2'-fluorouridine-3'-phosphate
  modified_base 10: mod_base = OTHER; note = 2'-O-methyluridine-3'-phosphate
  modified_base 11: mod_base = OTHER; note = 2'-O-methylguanosine-3'-phosphate
  modified_base 12: mod_base = OTHER; note = 2'-O-methyladenosine-3'-phosphate
  modified_base 13: mod_base = OTHER; note = 2'-O-methylguanosine-3'-phosphate
  modified_base 14: mod_base = OTHER; note = 2'-deoxy-2'-fluorouridine-3'-phosphate
  modified_base 15: mod_base = OTHER; note = 2'-O-methyluridine-3'-phosphate
  modified_base 16: mod_base = OTHER; note = 2'-deoxy-2'-fluorouridine-3'-phosphate
  modified_base 17: mod_base = OTHER; note = 2'-O-methylcytidine-3'-phosphate
  modified_base 18: mod_base = OTHER; note = 2'-O-methyluridine-3'-phosphate
  modified_base 19: mod_base = OTHER; note = 2'-O-methylguanosine-3'-phosphate
  modified_base 20: mod_base = OTHER; note = 2'-O-methyluridine-3'-phosphate
  modified_base 21: mod_base = OTHER; note = 2'-O-methylguanosine-3'-phosphorothioate
  modified_base 22: mod_base = OTHER; note = 2'-O-methylcytidine-3'-phosphorothioate
  modified_base 23: mod_base = OTHER; note = 2'-O-methylcytidine
tcactttattgagtttctgtgcc

SEQ ID NO: 179 - RNA, 23 nt, synthetic construct
  source 1..23: mol_type = other RNA
  modified_base 1: mod_base = OTHER; note = 2'-O-methyluridine-3'-phosphorothioate 5'-((cis-3,3,5-trimethyl-1,2-dithiolan-4-yl) (N-methylsulfonyl) phosphimidate)
  modified_base 2: mod_base = OTHER; note = 2'-deoxy-2'-fluorocytidine-3'-phosphorothioate
  modified_base 3: mod_base = OTHER; note = 2'-O-methyladenosine-3'-phosphate
  modified_base 4: mod_base = OTHER; note = 2'-O-methylcytidine-3'-phosphate
  modified_base 5: mod_base = OTHER; note = 2'-O-methyluridine-3'-phosphate
  modified_base 6: mod_base = OTHER; note = 2'-deoxy-2'-fluorouridine-3'-phosphate
  modified_base 7: mod_base = OTHER; note = 2'-O-methyluridine-3'-phosphate
  modified_base 8: mod_base = OTHER; note = 2'-deoxy-2'-fluoroadenosine-3'-phosphate
  modified_base 9: mod_base = OTHER; note = 2'-deoxy-2'-fluorouridine-3'-phosphate
  modified_base 10: mod_base = OTHER; note = 2'-O-methyluridine-3'-phosphate
  modified_base 11: mod_base = OTHER; note = 2'-O-methylguanosine-3'-phosphate
  modified_base 12: mod_base = OTHER; note = 2'-O-methyladenosine-3'-phosphate
  modified_base 13: mod_base = OTHER; note = 2'-O-methylguanosine-3'-phosphate
  modified_base 14: mod_base = OTHER; note = 2'-deoxy-2'-fluorouridine-3'-phosphate
  modified_base 15: mod_base = OTHER; note = 2'-O-methyluridine-3'-phosphate
  modified_base 16: mod_base = OTHER; note = 2'-deoxy-2'-fluorouridine-3'-phosphate
  modified_base 17: mod_base = OTHER; note = 2'-O-methylcytidine-3'-phosphate
  modified_base 18: mod_base = OTHER; note = 2'-O-methyluridine-3'-phosphate
  modified_base 19: mod_base = OTHER; note = 2'-O-methylguanosine-3'-phosphate
  modified_base 20: mod_base = OTHER; note = 2'-O-methyluridine-3'-phosphate
  modified_base 21: mod_base = OTHER; note = 2'-O-methylguanosine-3'-phosphorothioate
  modified_base 22: mod_base = OTHER; note = 2'-O-methylcytidine-3'-phosphorothioate
  modified_base 23: mod_base = OTHER; note = 2'-O-methylcytidine
tcactttattgagtttctgtgcc

SEQ ID NO: 180 - RNA, 23 nt, synthetic construct
  source 1..23: mol_type = other RNA
  modified_base 1: mod_base = OTHER; note = 2'-O-methyluridine-3'-phosphorothioate 5'-((cis-3,3-dimethyl-5-phenyl-1,2-dithiolan-4-yl) (1,3-dimethylimidazolidin-2-ylidene)phosphoramidate)
  modified_base 2: mod_base = OTHER; note = 2'-deoxy-2'-fluorocytidine-3'-phosphorothioate
  modified_base 3: mod_base = OTHER; note = 2'-O-methyladenosine-3'-phosphate
  modified_base 4: mod_base = OTHER; note = 2'-O-methylcytidine-3'-phosphate
  modified_base 5: mod_base = OTHER; note = 2'-O-methyluridine-3'-phosphate
  modified_base 6: mod_base = OTHER; note = 2'-deoxy-2'-fluorouridine-3'-phosphate
  modified_base 7: mod_base = OTHER; note = 2'-O-methyluridine-3'-phosphate
  modified_base 8: mod_base = OTHER; note = 2'-deoxy-2'-fluoroadenosine-3'-phosphate
  modified_base 9: mod_base = OTHER; note = 2'-deoxy-2'-fluorouridine-3'-phosphate
  modified_base 10: mod_base = OTHER; note = 2'-O-methyluridine-3'-phosphate
  modified_base 11: mod_base = OTHER; note = 2'-O-methylguanosine-3'-phosphate
  modified_base 12: mod_base = OTHER; note = 2'-O-methyladenosine-3'-phosphate
  modified_base 13: mod_base = OTHER; note = 2'-O-methylguanosine-3'-phosphate
  modified_base 14: mod_base = OTHER; note = 2'-deoxy-2'-fluorouridine-3'-phosphate
  modified_base 15: mod_base = OTHER; note = 2'-O-methyluridine-3'-phosphate
  modified_base 16: mod_base = OTHER; note = 2'-deoxy-2'-fluorouridine-3'-phosphate
  modified_base 17: mod_base = OTHER; note = 2'-O-methylcytidine-3'-phosphate
  modified_base 18: mod_base = OTHER; note = 2'-O-methyluridine-3'-phosphate
  modified_base 19: mod_base = OTHER; note = 2'-O-methylguanosine-3'-phosphate
  modified_base 20: mod_base = OTHER; note = 2'-O-methyluridine-3'-phosphate
  modified_base 21: mod_base = OTHER; note = 2'-O-methylguanosine-3'-phosphorothioate
  modified_base 22: mod_base = OTHER; note = 2'-O-methylcytidine-3'-phosphorothioate
  modified_base 23: mod_base = OTHER; note = 2'-O-methylcytidine
tcactttattgagtttctgtgcc

SEQ ID NO: 181 - RNA, 23 nt, synthetic construct
  source 1..23: mol_type = other RNA
  modified_base 1: mod_base = OTHER; note = 2'-O-methyluridine-3'-phosphorothioate 5'-(cis-5-phenyl-3,3-dimethyl-1,2-dithiolan-4-yl (N-methylsulfonyl) phosphimidate)
  modified_base 2: mod_base = OTHER; note = 2'-deoxy-2'-fluorocytidine-3'-phosphorothioate
  modified_base 3: mod_base = OTHER; note = 2'-O-methyladenosine-3'-phosphate
  modified_base 4: mod_base = OTHER; note = 2'-O-methylcytidine-3'-phosphate
  modified_base 5: mod_base = OTHER; note = 2'-O-methyluridine-3'-phosphate
  modified_base 6: mod_base = OTHER; note = 2'-deoxy-2'-fluorouridine-3'-phosphate
  modified_base 7: mod_base = OTHER; note = 2'-O-methyluridine-3'-phosphate
  modified_base 8: mod_base = OTHER; note = 2'-deoxy-2'-fluoroadenosine-3'-phosphate
  modified_base 9: mod_base = OTHER; note = 2'-deoxy-2'-fluorouridine-3'-phosphate
  modified_base 10: mod_base = OTHER; note = 2'-O-methyluridine-3'-phosphate
  modified_base 11: mod_base = OTHER; note = 2'-O-methylguanosine-3'-phosphate
  modified_base 12: mod_base = OTHER; note = 2'-O-methyladenosine-3'-phosphate
  modified_base 13: mod_base = OTHER; note = 2'-O-methylguanosine-3'-phosphate
  modified_base 14: mod_base = OTHER; note = 2'-deoxy-2'-fluorouridine-3'-phosphate
  modified_base 15: mod_base = OTHER; note = 2'-O-methyluridine-3'-phosphate
  modified_base 16: mod_base = OTHER; note = 2'-deoxy-2'-fluorouridine-3'-phosphate
  modified_base 17: mod_base = OTHER; note = 2'-O-methylcytidine-3'-phosphate
  modified_base 18: mod_base = OTHER; note = 2'-O-methyluridine-3'-phosphate
  modified_base 19: mod_base = OTHER; note = 2'-O-methylguanosine-3'-phosphate
  modified_base 20: mod_base = OTHER; note = 2'-O-methyluridine-3'-phosphate
  modified_base 21: mod_base = OTHER; note = 2'-O-methylguanosine-3'-phosphorothioate
  modified_base 22: mod_base = OTHER; note = 2'-O-methylcytidine-3'-phosphorothioate
  modified_base 23: mod_base = OTHER; note = 2'-O-methylcytidine
tcactttattgagtttctgtgcc

SEQ ID NO: 182 - RNA, 23 nt, synthetic construct
  source 1..23: mol_type = other RNA
  modified_base 1: mod_base = OTHER; note = 2'-O-methyluridine-3'-phosphorothioate 5'-(cis-3,3,5-trimethyl-1,2-dithiolan-4-yl thiophosphate)
  modified_base 2: mod_base = OTHER; note = 2'-deoxy-2'-fluorouridine-3'-phosphorothioate
  modified_base 3: mod_base = OTHER; note = 2'-O-methylcytidine-3'-phosphate
  modified_base 4: mod_base = OTHER; note = 2'-O-methyladenosine-3'-phosphate
  modified_base 5: mod_base = OTHER; note = 2'-O-methyluridine-3'-phosphate
  modified_base 6: mod_base = OTHER; note = 2'-deoxy-2'-fluorouridine-3'-phosphate
  modified_base 7: mod_base = OTHER; note = 2'-O-methyluridine-3'-phosphate
  modified_base 8: mod_base = OTHER; note = 2'-deoxy-2'-fluorocytidine-3'-phosphate
  modified_base 9: mod_base = OTHER; note = 2'-deoxy-2'-fluorocytidine-3'-phosphate
  modified_base 10: mod_base = OTHER; note = 2'-O-methyladenosine-3'-phosphate
  modified_base 11: mod_base = OTHER; note = 2'-O-methylcytidine-3'-phosphate
  modified_base 12: mod_base = OTHER; note = 2'-O-methylcytidine-3'-phosphate
  modified_base 13: mod_base = OTHER; note = 2'-O-methyluridine-3'-phosphate
  modified_base 14: mod_base = OTHER; note = 2'-deoxy-2'-fluorouridine-3'-phosphate
  modified_base 15: mod_base = OTHER; note = 2'-O-methyluridine-3'-phosphate
  modified_base 16: mod_base = OTHER; note = 2'-deoxy-2'-fluoroguanosine-3'-phosphate
  modified_base 17: mod_base = OTHER; note = 2'-O-methylcytidine-3'-phosphate
  modified_base 18: mod_base = OTHER; note = 2'-O-methylcytidine-3'-phosphate
  modified_base 19: mod_base = OTHER; note = 2'-O-methylcytidine-3'-phosphate
  modified_base 20: mod_base = OTHER; note = 2'-O-methyladenosine-3'-phosphate
  modified_base 21: mod_base = OTHER; note = 2'-O-methyladenosine-3'-phosphorothioate
  modified_base 22: mod_base = OTHER; note = 2'-O-methylguanosine-3'-phosphorothioate
  modified_base 23: mod_base = OTHER; note = 2'-O-methylcytidine
ttcatttccacctttgcccaagc

SEQ ID NO: 183 - RNA, 23 nt, synthetic construct
  source 1..23: mol_type = other RNA
  modified_base 1: mod_base = OTHER; note = 2'-O-methyluridine-3'-phosphorothioate 5'-(cis-5-(4-bromophenyl)-3,3-dimethyl-1,2-dithiolan-4-yl thiophosphate)
  modified_base 2: mod_base = OTHER; note = 2'-deoxy-2'-fluorouridine-3'-phosphorothioate
  modified_base 3: mod_base = OTHER; note = 2'-O-methylcytidine-3'-phosphate
  modified_base 4: mod_base = OTHER; note = 2'-O-methyladenosine-3'-phosphate
  modified_base 5: mod_base = OTHER; note = 2'-O-methyluridine-3'-phosphate
  modified_base 6: mod_base = OTHER; note = 2'-deoxy-2'-fluorouridine-3'-phosphate
  modified_base 7: mod_base = OTHER; note = 2'-O-methyluridine-3'-phosphate
  modified_base 8: mod_base = OTHER; note = 2'-deoxy-2'-fluorocytidine-3'-phosphate
  modified_base 9: mod_base = OTHER; note = 2'-deoxy-2'-fluorocytidine-3'-phosphate
  modified_base 10: mod_base = OTHER; note = 2'-O-methyladenosine-3'-phosphate
  modified_base 11: mod_base = OTHER; note = 2'-O-methylcytidine-3'-phosphate
  modified_base 12: mod_base = OTHER; note = 2'-O-methylcytidine-3'-phosphate
  modified_base 13: mod_base = OTHER; note = 2'-O-methyluridine-3'-phosphate
  modified_base 14: mod_base = OTHER; note = 2'-deoxy-2'-fluorouridine-3'-phosphate
  modified_base 15: mod_base = OTHER; note = 2'-O-methyluridine-3'-phosphate
  modified_base 16: mod_base = OTHER; note = 2'-deoxy-2'-fluoroguanosine-3'-phosphate
  modified_base 17: mod_base = OTHER; note = 2'-O-methylcytidine-3'-phosphate
  modified_base 18: mod_base = OTHER; note = 2'-O-methylcytidine-3'-phosphate
  modified_base 19: mod_base = OTHER; note = 2'-O-methylcytidine-3'-phosphate
  modified_base 20: mod_base = OTHER; note = 2'-O-methyladenosine-3'-phosphate
  modified_base 21: mod_base = OTHER; note = 2'-O-methyladenosine-3'-phosphorothioate
  modified_base 22: mod_base = OTHER; note = 2'-O-methylguanosine-3'-phosphorothioate
  modified_base 23: mod_base = OTHER; note = 2'-O-methylcytidine
ttcatttccacctttgcccaagc

SEQ ID NO: 184 - RNA, 23 nt, synthetic construct
  source 1..23: mol_type = other RNA
  modified_base 1: mod_base = OTHER; note = 2'-O-methyluridine-3'-phosphorothioate 5'-(cis-5-(4-cyanophenyl)-3,3-dimethyl-1,2-dithiolan-4-yl thiophosphate)
  modified_base 2: mod_base = OTHER; note = 2'-deoxy-2'-fluorouridine-3'-phosphorothioate
  modified_base 3: mod_base = OTHER; note = 2'-O-methylcytidine-3'-phosphate
  modified_base 4: mod_base = OTHER; note = 2'-O-methyladenosine-3'-phosphate
  modified_base 5: mod_base = OTHER; note = 2'-O-methyluridine-3'-phosphate
  modified_base 6: mod_base = OTHER; note = 2'-deoxy-2'-fluorouridine-3'-phosphate
  modified_base 7: mod_base = OTHER; note = 2'-O-methyluridine-3'-phosphate
  modified_base 8: mod_base = OTHER; note = 2'-deoxy-2'-fluorocytidine-3'-phosphate
  modified_base 9: mod_base = OTHER; note = 2'-deoxy-2'-fluorocytidine-3'-phosphate
  modified_base 10: mod_base = OTHER; note = 2'-O-methyladenosine-3'-phosphate
  modified_base 11: mod_base = OTHER; note = 2'-O-methylcytidine-3'-phosphate
  modified_base 12: mod_base = OTHER; note = 2'-O-methylcytidine-3'-phosphate
  modified_base 13: mod_base = OTHER; note = 2'-O-methyluridine-3'-phosphate
  modified_base 14: mod_base = OTHER; note = 2'-deoxy-2'-fluorouridine-3'-phosphate
  modified_base 15: mod_base = OTHER; note = 2'-O-methyluridine-3'-phosphate
  modified_base 16: mod_base = OTHER; note = 2'-deoxy-2'-fluoroguanosine-3'-phosphate
  modified_base 17: mod_base = OTHER; note = 2'-O-methylcytidine-3'-phosphate
  modified_base 18: mod_base = OTHER; note = 2'-O-methylcytidine-3'-phosphate
  modified_base 19: mod_base = OTHER; note = 2'-O-methylcytidine-3'-phosphate
  modified_base 20: mod_base = OTHER; note = 2'-O-methyladenosine-3'-phosphate
  modified_base 21: mod_base = OTHER; note = 2'-O-methyladenosine-3'-phosphorothioate
  modified_base 22: mod_base = OTHER; note = 2'-O-methylguanosine-3'-phosphorothioate
  modified_base 23: mod_base = OTHER; note = 2'-O-methylcytidine
ttcatttccacctttgcccaagc

SEQ ID NO: 185 - RNA, 23 nt, synthetic construct
  source 1..23: mol_type = other RNA
  modified_base 1: mod_base = OTHER; note = 2'-O-methyluridine-3'-phosphorothioate 5'-(cis-5-(4-fluorophenyl)-3,3-dimethyl-1,2-dithiolan-4-yl thiophosphate)
  modified_base 2: mod_base = OTHER; note = 2'-deoxy-2'-fluorouridine-3'-phosphorothioate
  modified_base 3: mod_base = OTHER; note = 2'-O-methylcytidine-3'-phosphate
  modified_base 4: mod_base = OTHER; note = 2'-O-methyladenosine-3'-phosphate
  modified_base 5: mod_base = OTHER; note = 2'-O-methyluridine-3'-phosphate
  modified_base 6: mod_base = OTHER; note = 2'-deoxy-2'-fluorouridine-3'-phosphate
  modified_base 7: mod_base = OTHER; note = 2'-O-methyluridine-3'-phosphate
  modified_base 8: mod_base = OTHER; note = 2'-deoxy-2'-fluorocytidine-3'-phosphate
  modified_base 9: mod_base = OTHER; note = 2'-deoxy-2'-fluorocytidine-3'-phosphate
  modified_base 10: mod_base = OTHER; note = 2'-O-methyladenosine-3'-phosphate
  modified_base 11: mod_base = OTHER; note = 2'-O-methylcytidine-3'-phosphate
  modified_base 12: mod_base = OTHER; note = 2'-O-methylcytidine-3'-phosphate
  modified_base 13: mod_base = OTHER; note = 2'-O-methyluridine-3'-phosphate
  modified_base 14: mod_base = OTHER; note = 2'-deoxy-2'-fluorouridine-3'-phosphate
  modified_base 15: mod_base = OTHER; note = 2'-O-methyluridine-3'-phosphate
  modified_base 16: mod_base = OTHER; note = 2'-deoxy-2'-fluoroguanosine-3'-phosphate
  modified_base 17: mod_base = OTHER; note = 2'-O-methylcytidine-3'-phosphate
  modified_base 18: mod_base = OTHER; note = 2'-O-methylcytidine-3'-phosphate
  modified_base 19: mod_base = OTHER; note = 2'-O-methylcytidine-3'-phosphate
  modified_base 20: mod_base = OTHER; note = 2'-O-methyladenosine-3'-phosphate
  modified_base 21: mod_base = OTHER; note = 2'-O-methyladenosine-3'-phosphorothioate
  modified_base 22: mod_base = OTHER; note = 2'-O-methylguanosine-3'-phosphorothioate
  modified_base 23: mod_base = OTHER; note = 2'-O-methylcytidine
ttcatttccacctttgcccaagc

SEQ ID NO: 186 - RNA, 23 nt, synthetic construct
  source 1..23: mol_type = other RNA
  modified_base 1: mod_base = OTHER; note = 2'-O-methyluridine-3'-phosphorothioate 5'-(cis-5-(benzo[1,3]dioxol-6-yl)-3,3-dimethyl-1,2-dithiola n-4-yl thiophosphate)
  modified_base 2: mod_base = OTHER; note = 2'-deoxy-2'-fluorouridine-3'-phosphorothioate
  modified_base 3: mod_base = OTHER; note = 2'-O-methylcytidine-3'-phosphate
  modified_base 4: mod_base = OTHER; note = 2'-O-methyladenosine-3'-phosphate
  modified_base 5: mod_base = OTHER; note = 2'-O-methyluridine-3'-phosphate
  modified_base 6: mod_base = OTHER; note = 2'-deoxy-2'-fluorouridine-3'-phosphate
  modified_base 7: mod_base = OTHER; note = 2'-O-methyluridine-3'-phosphate
  modified_base 8: mod_base = OTHER; note = 2'-deoxy-2'-fluorocytidine-3'-phosphate
  modified_base 9: mod_base = OTHER; note = 2'-deoxy-2'-fluorocytidine-3'-phosphate
  modified_base 10: mod_base = OTHER; note = 2'-O-methyladenosine-3'-phosphate
  modified_base 11: mod_base = OTHER; note = 2'-O-methylcytidine-3'-phosphate
  modified_base 12: mod_base = OTHER; note = 2'-O-methylcytidine-3'-phosphate
  modified_base 13: mod_base = OTHER; note = 2'-O-methyluridine-3'-phosphate
  modified_base 14: mod_base = OTHER; note = 2'-deoxy-2'-fluorouridine-3'-phosphate
  modified_base 15: mod_base = OTHER; note = 2'-O-methyluridine-3'-phosphate
  modified_base 16: mod_base = OTHER; note = 2'-deoxy-2'-fluoroguanosine-3'-phosphate
  modified_base 17: mod_base = OTHER; note = 2'-O-methylcytidine-3'-phosphate
  modified_base 18: mod_base = OTHER; note = 2'-O-methylcytidine-3'-phosphate
  modified_base 19: mod_base = OTHER; note = 2'-O-methylcytidine-3'-phosphate
  modified_base 20: mod_base = OTHER; note = 2'-O-methyladenosine-3'-phosphate
  modified_base 21: mod_base = OTHER; note = 2'-O-methyladenosine-3'-phosphorothioate
  modified_base 22: mod_base = OTHER; note = 2'-O-methylguanosine-3'-phosphorothioate
  modified_base 23: mod_base = OTHER; note = 2'-O-methylcytidine
ttcatttccacctttgcccaagc

SEQ ID NO: 187 - RNA, 23 nt, synthetic construct
  source 1..23: mol_type = other RNA
  modified_base 1: mod_base = OTHER; note = 2'-O-methyluridine-3'-phosphorothioate 5'-(cis-5-(2-methylphenyl)-3,3-dimethyl-1,2-dithiolan-4-yl thiophosphate)
  modified_base 2: mod_base = OTHER; note = 2'-deoxy-2'-fluorouridine-3'-phosphorothioate
  modified_base 3: mod_base = OTHER; note = 2'-O-methylcytidine-3'-phosphate
  modified_base 4: mod_base = OTHER; note = 2'-O-methyladenosine-3'-phosphate
  modified_base 5: mod_base = OTHER; note = 2'-O-methyluridine-3'-phosphate
  modified_base 6: mod_base = OTHER; note = 2'-deoxy-2'-fluorouridine-3'-phosphate
  modified_base 7: mod_base = OTHER; note = 2'-O-methyluridine-3'-phosphate
  modified_base 8: mod_base = OTHER; note = 2'-deoxy-2'-fluorocytidine-3'-phosphate
  modified_base 9: mod_base = OTHER; note = 2'-deoxy-2'-fluorocytidine-3'-phosphate
  modified_base 10: mod_base = OTHER; note = 2'-O-methyladenosine-3'-phosphate
  modified_base 11: mod_base = OTHER; note = 2'-O-methylcytidine-3'-phosphate
  modified_base 12: mod_base = OTHER; note = 2'-O-methylcytidine-3'-phosphate
  modified_base 13: mod_base = OTHER; note = 2'-O-methyluridine-3'-phosphate
  modified_base 14: mod_base = OTHER; note = 2'-deoxy-2'-fluorouridine-3'-phosphate
  modified_base 15: mod_base = OTHER; note = 2'-O-methyluridine-3'-phosphate
  modified_base 16: mod_base = OTHER; note = 2'-deoxy-2'-fluoroguanosine-3'-phosphate
  modified_base 17: mod_base = OTHER; note = 2'-O-methylcytidine-3'-phosphate
  modified_base 18: mod_base = OTHER; note = 2'-O-methylcytidine-3'-phosphate
  modified_base 19: mod_base = OTHER; note = 2'-O-methylcytidine-3'-phosphate
  modified_base 20: mod_base = OTHER; note = 2'-O-methyladenosine-3'-phosphate
  modified_base 21: mod_base = OTHER; note = 2'-O-methyladenosine-3'-phosphorothioate
  modified_base 22: mod_base = OTHER; note = 2'-O-methylguanosine-3'-phosphorothioate
  modified_base 23: mod_base = OTHER; note = 2'-O-methylcytidine
ttcatttccacctttgcccaagc

SEQ ID NO: 188 - RNA, 23 nt, synthetic construct
  source 1..23: mol_type = other RNA
  modified_base 1: mod_base = OTHER; note = 2'-O-methyluridine-3'-phosphorothioate 5'-(cis-5-(2-methoxyphenyl)-3,3-dimethyl-1,2-dithiolan-4-yl thiophosphate)
  modified_base 2: mod_base = OTHER; note = 2'-deoxy-2'-fluorouridine-3'-phosphorothioate
  modified_base 3: mod_base = OTHER; note = 2'-O-methylcytidine-3'-phosphate
  modified_base 4: mod_base = OTHER; note = 2'-O-methyladenosine-3'-phosphate
  modified_base 5: mod_base = OTHER; note = 2'-O-methyluridine-3'-phosphate
  modified_base 6: mod_base = OTHER; note = 2'-deoxy-2'-fluorouridine-3'-phosphate
  modified_base 7: mod_base = OTHER; note = 2'-O-methyluridine-3'-phosphate
  modified_base 8: mod_base = OTHER; note = 2'-deoxy-2'-fluorocytidine-3'-phosphate
  modified_base 9: mod_base = OTHER; note = 2'-deoxy-2'-fluorocytidine-3'-phosphate
  modified_base 10: mod_base = OTHER; note = 2'-O-methyladenosine-3'-phosphate
  modified_base 11: mod_base = OTHER; note = 2'-O-methylcytidine-3'-phosphate
  modified_base 12: mod_base = OTHER; note = 2'-O-methylcytidine-3'-phosphate
  modified_base 13: mod_base = OTHER; note = 2'-O-methyluridine-3'-phosphate
  modified_base 14: mod_base = OTHER; note = 2'-deoxy-2'-fluorouridine-3'-phosphate
  modified_base 15: mod_base = OTHER; note = 2'-O-methyluridine-3'-phosphate
  modified_base 16: mod_base = OTHER; note = 2'-deoxy-2'-fluoroguanosine-3'-phosphate
  modified_base 17: mod_base = OTHER; note = 2'-O-methylcytidine-3'-phosphate
  modified_base 18: mod_base = OTHER; note = 2'-O-methylcytidine-3'-phosphate
  modified_base 19: mod_base = OTHER; note = 2'-O-methylcytidine-3'-phosphate
  modified_base 20: mod_base = OTHER; note = 2'-O-methyladenosine-3'-phosphate
  modified_base 21: mod_base = OTHER; note = 2'-O-methyladenosine-3'-phosphorothioate
  modified_base 22: mod_base = OTHER; note = 2'-O-methylguanosine-3'-phosphorothioate
  modified_base 23: mod_base = OTHER; note = 2'-O-methylcytidine
ttcatttccacctttgcccaagc

SEQ ID NO: 189 - RNA, 23 nt, synthetic construct
  source 1..23: mol_type = other RNA
  modified_base 1: mod_base = OTHER; note = 2'-O-methyluridine-3'-phosphorothioate 5'-((cis-3,3,5-trimethyl-1,2-dithiolan-4-yl) (1,3-dimethylimidazolidin-2-ylidene)phosphoramidate)
  modified_base 2: mod_base = OTHER; note = 2'-deoxy-2'-fluorouridine-3'-phosphorothioate
  modified_base 3: mod_base = OTHER; note = 2'-O-methylcytidine-3'-phosphate
  modified_base 4: mod_base = OTHER; note = 2'-O-methyladenosine-3'-phosphate
  modified_base 5: mod_base = OTHER; note = 2'-O-methyluridine-3'-phosphate
  modified_base 6: mod_base = OTHER; note = 2'-deoxy-2'-fluorouridine-3'-phosphate
  modified_base 7: mod_base = OTHER; note = 2'-O-methyluridine-3'-phosphate
  modified_base 8: mod_base = OTHER; note = 2'-deoxy-2'-fluorocytidine-3'-phosphate
  modified_base 9: mod_base = OTHER; note = 2'-deoxy-2'-fluorocytidine-3'-phosphate
  modified_base 10: mod_base = OTHER; note = 2'-O-methyladenosine-3'-phosphate
  modified_base 11: mod_base = OTHER; note = 2'-O-methylcytidine-3'-phosphate
  modified_base 12: mod_base = OTHER; note = 2'-O-methylcytidine-3'-phosphate
  modified_base 13: mod_base = OTHER; note = 2'-O-methyluridine-3'-phosphate
  modified_base 14: mod_base = OTHER; note = 2'-deoxy-2'-fluorouridine-3'-phosphate
  modified_base 15: mod_base = OTHER; note = 2'-O-methyluridine-3'-phosphate
  modified_base 16: mod_base = OTHER; note = 2'-deoxy-2'-fluoroguanosine-3'-phosphate
  modified_base 17: mod_base = OTHER; note = 2'-O-methylcytidine-3'-phosphate
  modified_base 18: mod_base = OTHER; note = 2'-O-methylcytidine-3'-phosphate
  modified_base 19: mod_base = OTHER; note = 2'-O-methylcytidine-3'-phosphate
  modified_base 20: mod_base = OTHER; note = 2'-O-methyladenosine-3'-phosphate
  modified_base 21: mod_base = OTHER; note = 2'-O-methyladenosine-3'-phosphorothioate
  modified_base 22: mod_base = OTHER; note = 2'-O-methylguanosine-3'-phosphorothioate
  modified_base 23: mod_base = OTHER; note = 2'-O-methylcytidine
ttcatttccacctttgcccaagc

SEQ ID NO: 190 - RNA, 23 nt, synthetic construct
  source 1..23: mol_type = other RNA
  modified_base 1: mod_base = OTHER; note = 2'-O-methyluridine-3'-phosphorothioate 5'-((cis-3,3,5-trimethyl-1,2-dithiolan-4-yl) (N-methylsulfonyl) phosphimidate)
  modified_base 2: mod_base = OTHER; note = 2'-deoxy-2'-fluorouridine-3'-phosphorothioate
  modified_base 3: mod_base = OTHER; note = 2'-O-methylcytidine-3'-phosphate
  modified_base 4: mod_base = OTHER; note = 2'-O-methyladenosine-3'-phosphate
  modified_base 5: mod_base = OTHER; note = 2'-O-methyluridine-3'-phosphate
  modified_base 6: mod_base = OTHER; note = 2'-deoxy-2'-fluorouridine-3'-phosphate
  modified_base 7: mod_base = OTHER; note = 2'-O-methyluridine-3'-phosphate
  modified_base 8: mod_base = OTHER; note = 2'-deoxy-2'-fluorocytidine-3'-phosphate
  modified_base 9: mod_base = OTHER; note = 2'-deoxy-2'-fluorocytidine-3'-phosphate
  modified_base 10: mod_base = OTHER; note = 2'-O-methyladenosine-3'-phosphate
  modified_base 11: mod_base = OTHER; note = 2'-O-methylcytidine-3'-phosphate
  modified_base 12: mod_base = OTHER; note = 2'-O-methylcytidine-3'-phosphate
  modified_base 13: mod_base = OTHER; note = 2'-O-methyluridine-3'-phosphate
  modified_base 14: mod_base = OTHER; note = 2'-deoxy-2'-fluorouridine-3'-phosphate
  modified_base 15: mod_base = OTHER; note = 2'-O-methyluridine-3'-phosphate
  modified_base 16: mod_base = OTHER; note = 2'-deoxy-2'-fluoroguanosine-3'-phosphate
  modified_base 17: mod_base = OTHER; note = 2'-O-methylcytidine-3'-phosphate
  modified_base 18: mod_base = OTHER; note = 2'-O-methylcytidine-3'-phosphate
  modified_base 19: mod_base = OTHER; note = 2'-O-methylcytidine-3'-phosphate
  modified_base 20: mod_base = OTHER; note = 2'-O-methyladenosine-3'-phosphate
  modified_base 21: mod_base = OTHER; note = 2'-O-methyladenosine-3'-phosphorothioate
  modified_base 22: mod_base = OTHER; note = 2'-O-methylguanosine-3'-phosphorothioate
  modified_base 23: mod_base = OTHER; note = 2'-O-methylcytidine
ttcatttccacctttgcccaagc

SEQ ID NO: 191 - RNA, 23 nt, synthetic construct
  source 1..23: mol_type = other RNA
  modified_base 1: mod_base = OTHER; note = 2'-O-methyluridine-3'-phosphorothioate 5'-((cis-3,3-dimethyl-5-phenyl-1,2-dithiolan-4-yl) (1,3-dimethylimidazolidin-2-ylidene)phosphoramidate)
  modified_base 2: mod_base = OTHER; note = 2'-deoxy-2'-fluorouridine-3'-phosphorothioate
  modified_base 3: mod_base = OTHER; note = 2'-O-methylcytidine-3'-phosphate
  modified_base 4: mod_base = OTHER; note = 2'-O-methyladenosine-3'-phosphate
  modified_base 5: mod_base = OTHER; note = 2'-O-methyluridine-3'-phosphate
  modified_base 6: mod_base = OTHER; note = 2'-deoxy-2'-fluorouridine-3'-phosphate
  modified_base 7: mod_base = OTHER; note = 2'-O-methyluridine-3'-phosphate
  modified_base 8: mod_base = OTHER; note = 2'-deoxy-2'-fluorocytidine-3'-phosphate
  modified_base 9: mod_base = OTHER; note = 2'-deoxy-2'-fluorocytidine-3'-phosphate
  modified_base 10: mod_base = OTHER; note = 2'-O-methyladenosine-3'-phosphate
  modified_base 11: mod_base = OTHER; note = 2'-O-methylcytidine-3'-phosphate
  modified_base 12: mod_base = OTHER; note = 2'-O-methylcytidine-3'-phosphate
  modified_base 13: mod_base = OTHER; note = 2'-O-methyluridine-3'-phosphate
  modified_base 14: mod_base = OTHER; note = 2'-deoxy-2'-fluorouridine-3'-phosphate
  modified_base 15: mod_base = OTHER; note = 2'-O-methyluridine-3'-phosphate
  modified_base 16: mod_base = OTHER; note = 2'-deoxy-2'-fluoroguanosine-3'-phosphate
  modified_base 17: mod_base = OTHER; note = 2'-O-methylcytidine-3'-phosphate
  modified_base 18: mod_base = OTHER; note = 2'-O-methylcytidine-3'-phosphate
  modified_base 19: mod_base = OTHER; note = 2'-O-methylcytidine-3'-phosphate
  modified_base 20: mod_base = OTHER; note = 2'-O-methyladenosine-3'-phosphate
  modified_base 21: mod_base = OTHER; note = 2'-O-methyladenosine-3'-phosphorothioate
  modified_base 22: mod_base = OTHER; note = 2'-O-methylguanosine-3'-phosphorothioate
  modified_base 23: mod_base = OTHER; note = 2'-O-methylcytidine
ttcatttccacctttgcccaagc

SEQ ID NO: 192 - RNA, 23 nt, synthetic construct
  source 1..23: mol_type = other RNA
  modified_base 1: mod_base = OTHER; note = 2'-O-methyluridine-3'-phosphorothioate 5'-(cis-5-phenyl-3,3-dimethyl-1,2-dithiolan-4-yl (N-methylsulfonyl) phosphimidate)
  modified_base 2: mod_base = OTHER; note = 2'-deoxy-2'-fluorouridine-3'-phosphorothioate
  modified_base 3: mod_base = OTHER; note = 2'-O-methylcytidine-3'-phosphate
  modified_base 4: mod_base = OTHER; note = 2'-O-methyladenosine-3'-phosphate
  modified_base 5: mod_base = OTHER; note = 2'-O-methyluridine-3'-phosphate
  modified_base 6: mod_base = OTHER; note = 2'-deoxy-2'-fluorouridine-3'-phosphate
  modified_base 7: mod_base = OTHER; note = 2'-O-methyluridine-3'-phosphate
  modified_base 8: mod_base = OTHER; note = 2'-deoxy-2'-fluorocytidine-3'-phosphate
  modified_base 9: mod_base = OTHER; note = 2'-deoxy-2'-fluorocytidine-3'-phosphate
  modified_base 10: mod_base = OTHER; note = 2'-O-methyladenosine-3'-phosphate
  modified_base 11: mod_base = OTHER; note = 2'-O-methylcytidine-3'-phosphate
  modified_base 12: mod_base = OTHER; note = 2'-O-methylcytidine-3'-phosphate
  modified_base 13: mod_base = OTHER; note = 2'-O-methyluridine-3'-phosphate
  modified_base 14: mod_base = OTHER; note = 2'-deoxy-2'-fluorouridine-3'-phosphate
  modified_base 15: mod_base = OTHER; note = 2'-O-methyluridine-3'-phosphate
  modified_base 16: mod_base = OTHER; note = 2'-deoxy-2'-fluoroguanosine-3'-phosphate
  modified_base 17: mod_base = OTHER; note = 2'-O-methylcytidine-3'-phosphate
  modified_base 18: mod_base = OTHER; note = 2'-O-methylcytidine-3'-phosphate
  modified_base 19: mod_base = OTHER; note = 2'-O-methylcytidine-3'-phosphate
  modified_base 20: mod_base = OTHER; note = 2'-O-methyladenosine-3'-phosphate
  modified_base 21: mod_base = OTHER; note = 2'-O-methyladenosine-3'-phosphorothioate
  modified_base 22: mod_base = OTHER; note = 2'-O-methylguanosine-3'-phosphorothioate
  modified_base 23: mod_base = OTHER; note = 2'-O-methylcytidine
ttcatttccacctttgcccaagc

SEQ ID NO: 193 - RNA, 23 nt, synthetic construct
  source 1..23: mol_type = other RNA
  modified_base 1: mod_base = OTHER; note = 2'-O-methyluridine-3'-phosphorothioate 5'-(cis-5-(2,4-difluorophenyl)-3,3-dimethyl-1,2-dithiolan-4 -yl thiophosphate)
  modified_base 2: mod_base = OTHER; note = 2'-deoxy-2'-fluorocytidine-3'-phosphorothioate
  modified_base 3: mod_base = OTHER; note = 2'-O-methyladenosine-3'-phosphate
  modified_base 4: mod_base = OTHER; note = 2'-O-methylcytidine-3'-phosphate
  modified_base 5: mod_base = OTHER; note = 2'-O-methyluridine-3'-phosphate
  modified_base 6: mod_base = OTHER; note = 2'-deoxy-2'-fluorouridine-3'-phosphate
  modified_base 7: mod_base = OTHER; note = 2'-O-methyluridine-3'-phosphate
  modified_base 8: mod_base = OTHER; note = 2'-deoxy-2'-fluoroadenosine-3'-phosphate
  modified_base 9: mod_base = OTHER; note = 2'-deoxy-2'-fluorouridine-3'-phosphate
  modified_base 10: mod_base = OTHER; note = 2'-O-methyluridine-3'-phosphate
  modified_base 11: mod_base = OTHER; note = 2'-O-methylguanosine-3'-phosphate
  modified_base 12: mod_base = OTHER; note = 2'-O-methyladenosine-3'-phosphate
  modified_base 13: mod_base = OTHER; note = 2'-O-methylguanosine-3'-phosphate
  modified_base 14: mod_base = OTHER; note = 2'-deoxy-2'-fluorouridine-3'-phosphate
  modified_base 15: mod_base = OTHER; note = 2'-O-methyluridine-3'-phosphate
  modified_base 16: mod_base = OTHER; note = 2'-deoxy-2'-fluorouridine-3'-phosphate
  modified_base 17: mod_base = OTHER; note = 2'-O-methylcytidine-3'-phosphate
  modified_base 18: mod_base = OTHER; note = 2'-O-methyluridine-3'-phosphate
  modified_base 19: mod_base = OTHER; note = 2'-O-methylguanosine-3'-phosphate
  modified_base 20: mod_base = OTHER; note = 2'-O-methyluridine-3'-phosphate
  modified_base 21: mod_base = OTHER; note = 2'-O-methylguanosine-3'-phosphorothioate
  modified_base 22: mod_base = OTHER; note = 2'-O-methylcytidine-3'-phosphorothioate
  modified_base 23: mod_base = OTHER; note = 2'-O-methylcytidine
tcactttattgagtttctgtgcc

SEQ ID NO: 194 - RNA, 23 nt, synthetic construct
  source 1..23: mol_type = other RNA
  modified_base 1: mod_base = OTHER; note = 2'-O-methyluridine-3'-phosphorothioate 5'-(cis-5-(4-trifluoromethylphenyl)-3,3-dimethyl-1,2-dithio lan-4-yl thiophosphate)
  modified_base 2: mod_base = OTHER; note = 2'-deoxy-2'-fluorocytidine-3'-phosphorothioate
  modified_base 3: mod_base = OTHER; note = 2'-O-methyladenosine-3'-phosphate
  modified_base 4: mod_base = OTHER; note = 2'-O-methylcytidine-3'-phosphate
  modified_base 5: mod_base = OTHER; note = 2'-O-methyluridine-3'-phosphate
  modified_base 6: mod_base = OTHER; note = 2'-deoxy-2'-fluorouridine-3'-phosphate
  modified_base 7: mod_base = OTHER; note = 2'-O-methyluridine-3'-phosphate
  modified_base 8: mod_base = OTHER; note = 2'-deoxy-2'-fluoroadenosine-3'-phosphate
  modified_base 9: mod_base = OTHER; note = 2'-deoxy-2'-fluorouridine-3'-phosphate
  modified_base 10: mod_base = OTHER; note = 2'-O-methyluridine-3'-phosphate
  modified_base 11: mod_base = OTHER; note = 2'-O-methylguanosine-3'-phosphate
  modified_base 12: mod_base = OTHER; note = 2'-O-methyladenosine-3'-phosphate
  modified_base 13: mod_base = OTHER; note = 2'-O-methylguanosine-3'-phosphate
  modified_base 14: mod_base = OTHER; note = 2'-deoxy-2'-fluorouridine-3'-phosphate
  modified_base 15: mod_base = OTHER; note = 2'-O-methyluridine-3'-phosphate
  modified_base 16: mod_base = OTHER; note = 2'-deoxy-2'-fluorouridine-3'-phosphate
  modified_base 17: mod_base = OTHER; note = 2'-O-methylcytidine-3'-phosphate
  modified_base 18: mod_base = OTHER; note = 2'-O-methyluridine-3'-phosphate
  modified_base 19: mod_base = OTHER; note = 2'-O-methylguanosine-3'-phosphate
  modified_base 20: mod_base = OTHER; note = 2'-O-methyluridine-3'-phosphate
  modified_base 21: mod_base = OTHER; note = 2'-O-methylguanosine-3'-phosphorothioate
  modified_base 22: mod_base = OTHER; note = 2'-O-methylcytidine-3'-phosphorothioate
  modified_base 23: mod_base = OTHER; note = 2'-O-methylcytidine
tcactttattgagtttctgtgcc

SEQ ID NO: 195 - RNA, 23 nt, synthetic construct
  source 1..23: mol_type = other RNA
  modified_base 1: mod_base = OTHER; note = 2'-O-methyluridine-3'-phosphorothioate 5'-(cis-5-(3-methoxyphenyl)-3,3-dimethyl-1,2-dithiolan-4-yl thiophosphate)
  modified_base 2: mod_base = OTHER; note = 2'-deoxy-2'-fluorocytidine-3'-phosphorothioate
  modified_base 3: mod_base = OTHER; note = 2'-O-methyladenosine-3'-phosphate
  modified_base 4: mod_base = OTHER; note = 2'-O-methylcytidine-3'-phosphate
  modified_base 5: mod_base = OTHER; note = 2'-O-methyluridine-3'-phosphate
  modified_base 6: mod_base = OTHER; note = 2'-deoxy-2'-fluorouridine-3'-phosphate
  modified_base 7: mod_base = OTHER; note = 2'-O-methyluridine-3'-phosphate
  modified_base 8: mod_base = OTHER; note = 2'-deoxy-2'-fluoroadenosine-3'-phosphate
  modified_base 9: mod_base = OTHER; note = 2'-deoxy-2'-fluorouridine-3'-phosphate
  modified_base 10: mod_base = OTHER; note = 2'-O-methyluridine-3'-phosphate
  modified_base 11: mod_base = OTHER; note = 2'-O-methylguanosine-3'-phosphate
  modified_base 12: mod_base = OTHER; note = 2'-O-methyladenosine-3'-phosphate
  modified_base 13: mod_base = OTHER; note = 2'-O-methylguanosine-3'-phosphate
  modified_base 14: mod_base = OTHER; note = 2'-deoxy-2'-fluorouridine-3'-phosphate
  modified_base 15: mod_base = OTHER; note = 2'-O-methyluridine-3'-phosphate
  modified_base 16: mod_base = OTHER; note = 2'-deoxy-2'-fluorouridine-3'-phosphate
  modified_base 17: mod_base = OTHER; note = 2'-O-methylcytidine-3'-phosphate
  modified_base 18: mod_base = OTHER; note = 2'-O-methyluridine-3'-phosphate
  modified_base 19: mod_base = OTHER; note = 2'-O-methylguanosine-3'-phosphate
  modified_base 20: mod_base = OTHER; note = 2'-O-methyluridine-3'-phosphate
  modified_base 21: mod_base = OTHER; note = 2'-O-methylguanosine-3'-phosphorothioate
  modified_base 22: mod_base = OTHER; note = 2'-O-methylcytidine-3'-phosphorothioate
  modified_base 23: mod_base = OTHER; note = 2'-O-methylcytidine
tcactttattgagtttctgtgcc

SEQ ID NO: 196 - RNA, 23 nt, synthetic construct
  source 1..23: mol_type = other RNA
  modified_base 1: mod_base = OTHER; note = 2'-O-methyluridine-3'-phosphorothioate 5'-(cis-5-ethyl-3,3-dimethyl-1,2-dithiolan-4-yl thiophosphate)
  modified_base 2: mod_base = OTHER; note = 2'-deoxy-2'-fluorocytidine-3'-phosphorothioate
  modified_base 3: mod_base = OTHER; note = 2'-O-methyladenosine-3'-phosphate
  modified_base 4: mod_base = OTHER; note = 2'-O-methylcytidine-3'-phosphate
  modified_base 5: mod_base = OTHER; note = 2'-O-methyluridine-3'-phosphate
  modified_base 6: mod_base = OTHER; note = 2'-deoxy-2'-fluorouridine-3'-phosphate
  modified_base 7: mod_base = OTHER; note = 2'-O-methyluridine-3'-phosphate
  modified_base 8: mod_base = OTHER; note = 2'-deoxy-2'-fluoroadenosine-3'-phosphate
  modified_base 9: mod_base = OTHER; note = 2'-deoxy-2'-fluorouridine-3'-phosphate
  modified_base 10: mod_base = OTHER; note = 2'-O-methyluridine-3'-phosphate
  modified_base 11: mod_base = OTHER; note = 2'-O-methylguanosine-3'-phosphate
  modified_base 12: mod_base = OTHER; note = 2'-O-methyladenosine-3'-phosphate
  modified_base 13: mod_base = OTHER; note = 2'-O-methylguanosine-3'-phosphate
  modified_base 14: mod_base = OTHER; note = 2'-deoxy-2'-fluorouridine-3'-phosphate
  modified_base 15: mod_base = OTHER; note = 2'-O-methyluridine-3'-phosphate
  modified_base 16: mod_base = OTHER; note = 2'-deoxy-2'-fluorouridine-3'-phosphate
  modified_base 17: mod_base = OTHER; note = 2'-O-methylcytidine-3'-phosphate
  modified_base 18: mod_base = OTHER; note = 2'-O-methyluridine-3'-phosphate
  modified_base 19: mod_base = OTHER; note = 2'-O-methylguanosine-3'-phosphate
  modified_base 20: mod_base = OTHER; note = 2'-O-methyluridine-3'-phosphate
  modified_base 21: mod_base = OTHER; note = 2'-O-methylguanosine-3'-phosphorothioate
  modified_base 22: mod_base = OTHER; note = 2'-O-methylcytidine-3'-phosphorothioate
  modified_base 23: mod_base = OTHER; note = 2'-O-methylcytidine
tcactttattgagtttctgtgcc

SEQ ID NO: 197 - RNA, 23 nt, synthetic construct
  source 1..23: mol_type = other RNA
  modified_base 1: mod_base = OTHER; note = 2'-O-methyluridine-3'-phosphorothioate 5'-(cis-5-isopropyl-3,3-dimethyl-1,2-dithiolan-4-yl thiophosphate)
  modified_base 2: mod_base = OTHER; note = 2'-deoxy-2'-fluorocytidine-3'-phosphorothioate
  modified_base 3: mod_base = OTHER; note = 2'-O-methyladenosine-3'-phosphate
  modified_base 4: mod_base = OTHER; note = 2'-O-methylcytidine-3'-phosphate
  modified_base 5: mod_base = OTHER; note = 2'-O-methyluridine-3'-phosphate
  modified_base 6: mod_base = OTHER; note = 2'-deoxy-2'-fluorouridine-3'-phosphate
  modified_base 7: mod_base = OTHER; note = 2'-O-methyluridine-3'-phosphate
  modified_base 8: mod_base = OTHER; note = 2'-deoxy-2'-fluoroadenosine-3'-phosphate
  modified_base 9: mod_base = OTHER; note = 2'-deoxy-2'-fluorouridine-3'-phosphate
  modified_base 10: mod_base = OTHER; note = 2'-O-methyluridine-3'-phosphate
  modified_base 11: mod_base = OTHER; note = 2'-O-methylguanosine-3'-phosphate
  modified_base 12: mod_base = OTHER; note = 2'-O-methyladenosine-3'-phosphate
  modified_base 13: mod_base = OTHER; note = 2'-O-methylguanosine-3'-phosphate
  modified_base 14: mod_base = OTHER; note = 2'-deoxy-2'-fluorouridine-3'-phosphate
  modified_base 15: mod_base = OTHER; note = 2'-O-methyluridine-3'-phosphate
  modified_base 16: mod_base = OTHER; note = 2'-deoxy-2'-fluorouridine-3'-phosphate
  modified_base 17: mod_base = OTHER; note = 2'-O-methylcytidine-3'-phosphate
  modified_base 18: mod_base = OTHER; note = 2'-O-methyluridine-3'-phosphate
  modified_base 19: mod_base = OTHER; note = 2'-O-methylguanosine-3'-phosphate
  modified_base 20: mod_base = OTHER; note = 2'-O-methyluridine-3'-phosphate
  modified_base 21: mod_base = OTHER; note = 2'-O-methylguanosine-3'-phosphorothioate
  modified_base 22: mod_base = OTHER; note = 2'-O-methylcytidine-3'-phosphorothioate
  modified_base 23: mod_base = OTHER; note = 2'-O-methylcytidine
tcactttattgagtttctgtgcc

SEQ ID NO: 198 - RNA, 23 nt, synthetic construct
  source 1..23: mol_type = other RNA
  modified_base 1: mod_base = OTHER; note = 2'-O-methyluridine-3'-phosphorothioate 5'-(cis-3-phenyl-1,2-dithiaspiro[4.3]octan-4-yl thiophosphate)
  modified_base 2: mod_base = OTHER; note = 2'-deoxy-2'-fluorocytidine-3'-phosphorothioate
  modified_base 3: mod_base = OTHER; note = 2'-O-methyladenosine-3'-phosphate
  modified_base 4: mod_base = OTHER; note = 2'-O-methylcytidine-3'-phosphate
  modified_base 5: mod_base = OTHER; note = 2'-O-methyluridine-3'-phosphate
  modified_base 6: mod_base = OTHER; note = 2'-deoxy-2'-fluorouridine-3'-phosphate
  modified_base 7: mod_base = OTHER; note = 2'-O-methyluridine-3'-phosphate
  modified_base 8: mod_base = OTHER; note = 2'-deoxy-2'-fluoroadenosine-3'-phosphate
  modified_base 9: mod_base = OTHER; note = 2'-deoxy-2'-fluorouridine-3'-phosphate
  modified_base 10: mod_base = OTHER; note = 2'-O-methyluridine-3'-phosphate
  modified_base 11: mod_base = OTHER; note = 2'-O-methylguanosine-3'-phosphate
  modified_base 12: mod_base = OTHER; note = 2'-O-methyladenosine-3'-phosphate
  modified_base 13: mod_base = OTHER; note = 2'-O-methylguanosine-3'-phosphate
  modified_base 14: mod_base = OTHER; note = 2'-deoxy-2'-fluorouridine-3'-phosphate
  modified_base 15: mod_base = OTHER; note = 2'-O-methyluridine-3'-phosphate
  modified_base 16: mod_base = OTHER; note = 2'-deoxy-2'-fluorouridine-3'-phosphate
  modified_base 17: mod_base = OTHER; note = 2'-O-methylcytidine-3'-phosphate
  modified_base 18: mod_base = OTHER; note = 2'-O-methyluridine-3'-phosphate
  modified_base 19: mod_base = OTHER; note = 2'-O-methylguanosine-3'-phosphate
  modified_base 20: mod_base = OTHER; note = 2'-O-methyluridine-3'-phosphate
  modified_base 21: mod_base = OTHER; note = 2'-O-methylguanosine-3'-phosphorothioate
  modified_base 22: mod_base = OTHER; note = 2'-O-methylcytidine-3'-phosphorothioate
  modified_base 23: mod_base = OTHER; note = 2'-O-methylcytidine
tcactttattgagtttctgtgcc

SEQ ID NO: 199 - RNA, 23 nt, synthetic construct
  source 1..23: mol_type = other RNA
  modified_base 1: mod_base = OTHER; note = 2'-O-methyluridine-3'-phosphorothioate 5'-(cis-3-phenyl-1,2-dithiaspiro[4.4]nonan-4-yl thiophosphate)
  modified_base 2: mod_base = OTHER; note = 2'-deoxy-2'-fluorocytidine-3'-phosphorothioate
  modified_base 3: mod_base = OTHER; note = 2'-O-methyladenosine-3'-phosphate
  modified_base 4: mod_base = OTHER; note = 2'-O-methylcytidine-3'-phosphate
  modified_base 5: mod_base = OTHER; note = 2'-O-methyluridine-3'-phosphate
  modified_base 6: mod_base = OTHER; note = 2'-deoxy-2'-fluorouridine-3'-phosphate
  modified_base 7: mod_base = OTHER; note = 2'-O-methyluridine-3'-phosphate
  modified_base 8: mod_base = OTHER; note = 2'-deoxy-2'-fluoroadenosine-3'-phosphate
  modified_base 9: mod_base = OTHER; note = 2'-deoxy-2'-fluorouridine-3'-phosphate
  modified_base 10: mod_base = OTHER; note = 2'-O-methyluridine-3'-phosphate
  modified_base 11: mod_base = OTHER; note = 2'-O-methylguanosine-3'-phosphate
  modified_base 12: mod_base = OTHER; note = 2'-O-methyladenosine-3'-phosphate
  modified_base 13: mod_base = OTHER; note = 2'-O-methylguanosine-3'-phosphate
  modified_base 14: mod_base = OTHER; note = 2'-deoxy-2'-fluorouridine-3'-phosphate
  modified_base 15: mod_base = OTHER; note = 2'-O-methyluridine-3'-phosphate
  modified_base 16: mod_base = OTHER; note = 2'-deoxy-2'-fluorouridine-3'-phosphate
  modified_base 17: mod_base = OTHER; note = 2'-O-methylcytidine-3'-phosphate
  modified_base 18: mod_base = OTHER; note = 2'-O-methyluridine-3'-phosphate
  modified_base 19: mod_base = OTHER; note = 2'-O-methylguanosine-3'-phosphate
  modified_base 20: mod_base = OTHER; note = 2'-O-methyluridine-3'-phosphate
  modified_base 21: mod_base = OTHER; note = 2'-O-methylguanosine-3'-phosphorothioate
  modified_base 22: mod_base = OTHER; note = 2'-O-methylcytidine-3'-phosphorothioate
  modified_base 23: mod_base = OTHER; note = 2'-O-methylcytidine
tcactttattgagtttctgtgcc

SEQ ID NO: 200 - RNA, 23 nt, synthetic construct
  source 1..23: mol_type = other RNA
  modified_base 1: mod_base = OTHER; note = 2'-O-methyluridine-3'-phosphorothioate 5'-(cis-3-phenyl-1,2-dithiaspiro[4.5]decan-4-yl thiophosphate)
  modified_base 2: mod_base = OTHER; note = 2'-deoxy-2'-fluorocytidine-3'-phosphorothioate
  modified_base 3: mod_base = OTHER; note = 2'-O-methyladenosine-3'-phosphate
  modified_base 4: mod_base = OTHER; note = 2'-O-methylcytidine-3'-phosphate
  modified_base 5: mod_base = OTHER; note = 2'-O-methyluridine-3'-phosphate
  modified_base 6: mod_base = OTHER; note = 2'-deoxy-2'-fluorouridine-3'-phosphate
  modified_base 7: mod_base = OTHER; note = 2'-O-methyluridine-3'-phosphate
  modified_base 8: mod_base = OTHER; note = 2'-deoxy-2'-fluoroadenosine-3'-phosphate
  modified_base 9: mod_base = OTHER; note = 2'-deoxy-2'-fluorouridine-3'-phosphate
  modified_base 10: mod_base = OTHER; note = 2'-O-methyluridine-3'-phosphate
  modified_base 11: mod_base = OTHER; note = 2'-O-methylguanosine-3'-phosphate
  modified_base 12: mod_base = OTHER; note = 2'-O-methyladenosine-3'-phosphate
  modified_base 13: mod_base = OTHER; note = 2'-O-methylguanosine-3'-phosphate
  modified_base 14: mod_base = OTHER; note = 2'-deoxy-2'-fluorouridine-3'-phosphate
  modified_base 15: mod_base = OTHER; note = 2'-O-methyluridine-3'-phosphate
  modified_base 16: mod_base = OTHER; note = 2'-deoxy-2'-fluorouridine-3'-phosphate
  modified_base 17: mod_base = OTHER; note = 2'-O-methylcytidine-3'-phosphate
  modified_base 18: mod_base = OTHER; note = 2'-O-methyluridine-3'-phosphate
  modified_base 19: mod_base = OTHER; note = 2'-O-methylguanosine-3'-phosphate
  modified_base 20: mod_base = OTHER; note = 2'-O-methyluridine-3'-phosphate
  modified_base 21: mod_base = OTHER; note = 2'-O-methylguanosine-3'-phosphorothioate
  modified_base 22: mod_base = OTHER; note = 2'-O-methylcytidine-3'-phosphorothioate
  modified_base 23: mod_base = OTHER; note = 2'-O-methylcytidine
tcactttattgagtttctgtgcc

SEQ ID NO: 201 - RNA, 23 nt, synthetic construct
  source 1..23: mol_type = other RNA
  modified_base 1: mod_base = OTHER; note = 2'-O-methyluridine-3'-phosphorothioate 5'-(cis-3,3,5-trimethyl-1,2-dithiolan-4-yl thiophosphate)
  modified_base 2: mod_base = OTHER; note = 2'-deoxy-2'-fluorouridine-3'-phosphorothioate
  modified_base 3: mod_base = OTHER; note = 2'-O-methyluridine-3'-phosphate
  modified_base 4: mod_base = OTHER; note = 2'-O-methyladenosine-3'-phosphate
  modified_base 5: mod_base = OTHER; note = 2'-O-methylguanosine-3'-phosphate
  modified_base 6: mod_base = OTHER; note = 2'-deoxy-2'-fluoroadenosine-3'-phosphate
  modified_base 7: mod_base = OTHER; note = 2'-O-methylguanosine-3'-phosphate
  modified_base 8: mod_base = OTHER; note = 2'-deoxy-2'-fluorouridine-3'-phosphate
  modified_base 9: mod_base = OTHER; note = 2'-deoxy-2'-fluoroguanosine-3'-phosphate
  modified_base 10: mod_base = OTHER; note = 2'-O-methyladenosine-3'-phosphate
  modified_base 11: mod_base = OTHER; note = 2'-O-methylguanosine-3'-phosphate
  modified_base 12: mod_base = OTHER; note = 2'-O-methylguanosine-3'-phosphate
  modified_base 13: mod_base = OTHER; note = 2'-O-methyladenosine-3'-phosphate
  modified_base 14: mod_base = OTHER; note = 2'-deoxy-2'-fluorouridine-3'-phosphate
  modified_base 15: mod_base = OTHER; note = 2'-O-methyluridine-3'-phosphate
  modified_base 16: mod_base = OTHER; note = 2'-deoxy-2'-fluoroadenosine-3'-phosphate
  modified_base 17: mod_base = OTHER; note = 2'-O-methyladenosine-3'-phosphate
  modified_base 18: mod_base = OTHER; note = 2'-O-methyladenosine-3'-phosphate
  modified_base 19: mod_base = OTHER; note = 2'-O-methyladenosine-3'-phosphate
  modified_base 20: mod_base = OTHER; note = 2'-O-methyluridine-3'-phosphate
  modified_base 21: mod_base = OTHER; note = 2'-O-methylguanosine-3'-phosphorothioate
  modified_base 22: mod_base = OTHER; note = 2'-O-methyladenosine-3'-phosphorothioate
  modified_base 23: mod_base = OTHER; note = 2'-O-methylguanosine
tttagagtgaggattaaaatgag

SEQ ID NO: 202 - RNA, 23 nt, synthetic construct
  source 1..23: mol_type = other RNA
  modified_base 1: mod_base = OTHER; note = 2'-O-methyluridine-3'-phosphorothioate 5'-(cis-5-(2,4-difluorophenyl)-3,3-dimethyl-1,2-dithiolan-4 -yl thiophosphate)
  modified_base 2: mod_base = OTHER; note = 2'-deoxy-2'-fluorouridine-3'-phosphorothioate
  modified_base 3: mod_base = OTHER; note = 2'-O-methyluridine-3'-phosphate
  modified_base 4: mod_base = OTHER; note = 2'-O-methyladenosine-3'-phosphate
  modified_base 5: mod_base = OTHER; note = 2'-O-methylguanosine-3'-phosphate
  modified_base 6: mod_base = OTHER; note = 2'-deoxy-2'-fluoroadenosine-3'-phosphate
  modified_base 7: mod_base = OTHER; note = 2'-O-methylguanosine-3'-phosphate
  modified_base 8: mod_base = OTHER; note = 2'-deoxy-2'-fluorouridine-3'-phosphate
  modified_base 9: mod_base = OTHER; note = 2'-deoxy-2'-fluoroguanosine-3'-phosphate
  modified_base 10: mod_base = OTHER; note = 2'-O-methyladenosine-3'-phosphate
  modified_base 11: mod_base = OTHER; note = 2'-O-methylguanosine-3'-phosphate
  modified_base 12: mod_base = OTHER; note = 2'-O-methylguanosine-3'-phosphate
  modified_base 13: mod_base = OTHER; note = 2'-O-methyladenosine-3'-phosphate
  modified_base 14: mod_base = OTHER; note = 2'-deoxy-2'-fluorouridine-3'-phosphate
  modified_base 15: mod_base = OTHER; note = 2'-O-methyluridine-3'-phosphate
  modified_base 16: mod_base = OTHER; note = 2'-deoxy-2'-fluoroadenosine-3'-phosphate
  modified_base 17: mod_base = OTHER; note = 2'-O-methyladenosine-3'-phosphate
  modified_base 18: mod_base = OTHER; note = 2'-O-methyladenosine-3'-phosphate
  modified_base 19: mod_base = OTHER; note = 2'-O-methyladenosine-3'-phosphate
  modified_base 20: mod_base = OTHER; note = 2'-O-methyluridine-3'-phosphate
  modified_base 21: mod_base = OTHER; note = 2'-O-methylguanosine-3'-phosphorothioate
  modified_base 22: mod_base = OTHER; note = 2'-O-methyladenosine-3'-phosphorothioate
  modified_base 23: mod_base = OTHER; note = 2'-O-methylguanosine
tttagagtgaggattaaaatgag

SEQ ID NO: 203 - RNA, 23 nt, synthetic construct
  source 1..23: mol_type = other RNA
  modified_base 1: mod_base = OTHER; note = 2'-O-methyluridine-3'-phosphorothioate 5'-(cis-5-(4-trifluoromethylphenyl)-3,3-dimethyl-1,2-dithio lan-4-yl thiophosphate)
  modified_base 2: mod_base = OTHER; note = 2'-deoxy-2'-fluorouridine-3'-phosphorothioate
  modified_base 3: mod_base = OTHER; note = 2'-O-methyluridine-3'-phosphate
  modified_base 4: mod_base = OTHER; note = 2'-O-methyladenosine-3'-phosphate
  modified_base 5: mod_base = OTHER; note = 2'-O-methylguanosine-3'-phosphate
  modified_base 6: mod_base = OTHER; note = 2'-deoxy-2'-fluoroadenosine-3'-phosphate
  modified_base 7: mod_base = OTHER; note = 2'-O-methylguanosine-3'-phosphate
  modified_base 8: mod_base = OTHER; note = 2'-deoxy-2'-fluorouridine-3'-phosphate
  modified_base 9: mod_base = OTHER; note = 2'-deoxy-2'-fluoroguanosine-3'-phosphate
  modified_base 10: mod_base = OTHER; note = 2'-O-methyladenosine-3'-phosphate
  modified_base 11: mod_base = OTHER; note = 2'-O-methylguanosine-3'-phosphate
  modified_base 12: mod_base = OTHER; note = 2'-O-methylguanosine-3'-phosphate
  modified_base 13: mod_base = OTHER; note = 2'-O-methyladenosine-3'-phosphate
  modified_base 14: mod_base = OTHER; note = 2'-deoxy-2'-fluorouridine-3'-phosphate
  modified_base 15: mod_base = OTHER; note = 2'-O-methyluridine-3'-phosphate
  modified_base 16: mod_base = OTHER; note = 2'-deoxy-2'-fluoroadenosine-3'-phosphate
  modified_base 17: mod_base = OTHER; note = 2'-O-methyladenosine-3'-phosphate
  modified_base 18: mod_base = OTHER; note = 2'-O-methyladenosine-3'-phosphate
  modified_base 19: mod_base = OTHER; note = 2'-O-methyladenosine-3'-phosphate
  modified_base 20: mod_base = OTHER; note = 2'-O-methyluridine-3'-phosphate
  modified_base 21: mod_base = OTHER; note = 2'-O-methylguanosine-3'-phosphorothioate
  modified_base 22: mod_base = OTHER; note = 2'-O-methyladenosine-3'-phosphorothioate
  modified_base 23: mod_base = OTHER; note = 2'-O-methylguanosine
tttagagtgaggattaaaatgag

SEQ ID NO: 204 - RNA, 23 nt, synthetic construct
  source 1..23: mol_type = other RNA
  modified_base 1: mod_base = OTHER; note = 2'-O-methyluridine-3'-phosphorothioate 5'-(cis-5-(3-methoxyphenyl)-3,3-dimethyl-1,2-dithiolan-4-yl thiophosphate)
  modified_base 2: mod_base = OTHER; note = 2'-deoxy-2'-fluorouridine-3'-phosphorothioate
  modified_base 3: mod_base = OTHER; note = 2'-O-methyluridine-3'-phosphate
  modified_base 4: mod_base = OTHER; note = 2'-O-methyladenosine-3'-phosphate
  modified_base 5: mod_base = OTHER; note = 2'-O-methylguanosine-3'-phosphate
  modified_base 6: mod_base = OTHER; note = 2'-deoxy-2'-fluoroadenosine-3'-phosphate
  modified_base 7: mod_base = OTHER; note = 2'-O-methylguanosine-3'-phosphate
  modified_base 8: mod_base = OTHER; note = 2'-deoxy-2'-fluorouridine-3'-phosphate
  modified_base 9: mod_base = OTHER; note = 2'-deoxy-2'-fluoroguanosine-3'-phosphate
  modified_base 10: mod_base = OTHER; note = 2'-O-methyladenosine-3'-phosphate
  modified_base 11: mod_base = OTHER; note = 2'-O-methylguanosine-3'-phosphate
  modified_base 12: mod_base = OTHER; note = 2'-O-methylguanosine-3'-phosphate
  modified_base 13: mod_base = OTHER; note = 2'-O-methyladenosine-3'-phosphate
  modified_base 14: mod_base = OTHER; note = 2'-deoxy-2'-fluorouridine-3'-phosphate
  modified_base 15: mod_base = OTHER; note = 2'-O-methyluridine-3'-phosphate
  modified_base 16: mod_base = OTHER; note = 2'-deoxy-2'-fluoroadenosine-3'-phosphate
  modified_base 17: mod_base = OTHER; note = 2'-O-methyladenosine-3'-phosphate
  modified_base 18: mod_base = OTHER; note = 2'-O-methyladenosine-3'-phosphate
  modified_base 19: mod_base = OTHER; note = 2'-O-methyladenosine-3'-phosphate
  modified_base 20: mod_base = OTHER; note = 2'-O-methyluridine-3'-phosphate
  modified_base 21: mod_base = OTHER; note = 2'-O-methylguanosine-3'-phosphorothioate
  modified_base 22: mod_base = OTHER; note = 2'-O-methyladenosine-3'-phosphorothioate
  modified_base 23: mod_base = OTHER; note = 2'-O-methylguanosine
tttagagtgaggattaaaatgag

SEQ ID NO: 205 - RNA, 23 nt, synthetic construct
  source 1..23: mol_type = other RNA
  modified_base 1: mod_base = OTHER; note = 2'-O-methyluridine-3'-phosphorothioate 5'-(cis-5-ethyl-3,3-dimethyl-1,2-dithiolan-4-yl thiophosphate)
  modified_base 2: mod_base = OTHER; note = 2'-deoxy-2'-fluorouridine-3'-phosphorothioate
  modified_base 3: mod_base = OTHER; note = 2'-O-methyluridine-3'-phosphate
  modified_base 4: mod_base = OTHER; note = 2'-O-methyladenosine-3'-phosphate
  modified_base 5: mod_base = OTHER; note = 2'-O-methylguanosine-3'-phosphate
  modified_base 6: mod_base = OTHER; note = 2'-deoxy-2'-fluoroadenosine-3'-phosphate
  modified_base 7: mod_base = OTHER; note = 2'-O-methylguanosine-3'-phosphate
  modified_base 8: mod_base = OTHER; note = 2'-deoxy-2'-fluorouridine-3'-phosphate
  modified_base 9: mod_base = OTHER; note = 2'-deoxy-2'-fluoroguanosine-3'-phosphate
  modified_base 10: mod_base = OTHER; note = 2'-O-methyladenosine-3'-phosphate
  modified_base 11: mod_base = OTHER; note = 2'-O-methylguanosine-3'-phosphate
  modified_base 12: mod_base = OTHER; note = 2'-O-methylguanosine-3'-phosphate
  modified_base 13: mod_base = OTHER; note = 2'-O-methyladenosine-3'-phosphate
  modified_base 14: mod_base = OTHER; note = 2'-deoxy-2'-fluorouridine-3'-phosphate
  modified_base 15: mod_base = OTHER; note = 2'-O-methyluridine-3'-phosphate
  modified_base 16: mod_base = OTHER; note = 2'-deoxy-2'-fluoroadenosine-3'-phosphate
  modified_base 17: mod_base = OTHER; note = 2'-O-methyladenosine-3'-phosphate
  modified_base 18: mod_base = OTHER; note = 2'-O-methyladenosine-3'-phosphate
  modified_base 19: mod_base = OTHER; note = 2'-O-methyladenosine-3'-phosphate
  modified_base 20: mod_base = OTHER; note = 2'-O-methyluridine-3'-phosphate
  modified_base 21: mod_base = OTHER; note = 2'-O-methylguanosine-3'-phosphorothioate
  modified_base 22: mod_base = OTHER; note = 2'-O-methyladenosine-3'-phosphorothioate
  modified_base 23: mod_base = OTHER; note = 2'-O-methylguanosine
tttagagtgaggattaaaatgag

SEQ ID NO: 206 - RNA, 23 nt, synthetic construct
  source 1..23: mol_type = other RNA
  modified_base 1: mod_base = OTHER; note = 2'-O-methyluridine-3'-phosphorothioate 5'-(cis-5-isopropyl-3,3-dimethyl-1,2-dithiolan-4-yl thiophosphate)
  modified_base 2: mod_base = OTHER; note = 2'-deoxy-2'-fluorouridine-3'-phosphorothioate
  modified_base 3: mod_base = OTHER; note = 2'-O-methyluridine-3'-phosphate
  modified_base 4: mod_base = OTHER; note = 2'-O-methyladenosine-3'-phosphate
  modified_base 5: mod_base = OTHER; note = 2'-O-methylguanosine-3'-phosphate
  modified_base 6: mod_base = OTHER; note = 2'-deoxy-2'-fluoroadenosine-3'-phosphate
  modified_base 7: mod_base = OTHER; note = 2'-O-methylguanosine-3'-phosphate
  modified_base 8: mod_base = OTHER; note = 2'-deoxy-2'-fluorouridine-3'-phosphate
  modified_base 9: mod_base = OTHER; note = 2'-deoxy-2'-fluoroguanosine-3'-phosphate
  modified_base 10: mod_base = OTHER; note = 2'-O-methyladenosine-3'-phosphate
  modified_base 11: mod_base = OTHER; note = 2'-O-methylguanosine-3'-phosphate
  modified_base 12: mod_base = OTHER; note = 2'-O-methylguanosine-3'-phosphate
  modified_base 13: mod_base = OTHER; note = 2'-O-methyladenosine-3'-phosphate
  modified_base 14: mod_base = OTHER; note = 2'-deoxy-2'-fluorouridine-3'-phosphate
  modified_base 15: mod_base = OTHER; note = 2'-O-methyluridine-3'-phosphate
  modified_base 16: mod_base = OTHER; note = 2'-deoxy-2'-fluoroadenosine-3'-phosphate
  modified_base 17: mod_base = OTHER; note = 2'-O-methyladenosine-3'-phosphate
  modified_base 18: mod_base = OTHER; note = 2'-O-methyladenosine-3'-phosphate
  modified_base 19: mod_base = OTHER; note = 2'-O-methyladenosine-3'-phosphate
  modified_base 20: mod_base = OTHER; note = 2'-O-methyluridine-3'-phosphate
  modified_base 21: mod_base = OTHER; note = 2'-O-methylguanosine-3'-phosphorothioate
  modified_base 22: mod_base = OTHER; note = 2'-O-methyladenosine-3'-phosphorothioate
  modified_base 23: mod_base = OTHER; note = 2'-O-methylguanosine
tttagagtgaggattaaaatgag

SEQ ID NO: 207 - RNA, 23 nt, synthetic construct
  source 1..23: mol_type = other RNA
  modified_base 1: mod_base = OTHER; note = 2'-O-methyluridine-3'-phosphorothioate 5'-(cis-3-phenyl-1,2-dithiaspiro[4.3]octan-4-yl thiophosphate)
  modified_base 2: mod_base = OTHER; note = 2'-deoxy-2'-fluorouridine-3'-phosphorothioate
  modified_base 3: mod_base = OTHER; note = 2'-O-methyluridine-3'-phosphate
  modified_base 4: mod_base = OTHER; note = 2'-O-methyladenosine-3'-phosphate
  modified_base 5: mod_base = OTHER; note = 2'-O-methylguanosine-3'-phosphate
  modified_base 6: mod_base = OTHER; note = 2'-deoxy-2'-fluoroadenosine-3'-phosphate
  modified_base 7: mod_base = OTHER; note = 2'-O-methylguanosine-3'-phosphate
  modified_base 8: mod_base = OTHER; note = 2'-deoxy-2'-fluorouridine-3'-phosphate
  modified_base 9: mod_base = OTHER; note = 2'-deoxy-2'-fluoroguanosine-3'-phosphate
  modified_base 10: mod_base = OTHER; note = 2'-O-methyladenosine-3'-phosphate
  modified_base 11: mod_base = OTHER; note = 2'-O-methylguanosine-3'-phosphate
  modified_base 12: mod_base = OTHER; note = 2'-O-methylguanosine-3'-phosphate
  modified_base 13: mod_base = OTHER; note = 2'-O-methyladenosine-3'-phosphate
  modified_base 14: mod_base = OTHER; note = 2'-deoxy-2'-fluorouridine-3'-phosphate
  modified_base 15: mod_base = OTHER; note = 2'-O-methyluridine-3'-phosphate
  modified_base 16: mod_base = OTHER; note = 2'-deoxy-2'-fluoroadenosine-3'-phosphate
  modified_base 17: mod_base = OTHER; note = 2'-O-methyladenosine-3'-phosphate
  modified_base 18: mod_base = OTHER; note = 2'-O-methyladenosine-3'-phosphate
  modified_base 19: mod_base = OTHER; note = 2'-O-methyladenosine-3'-phosphate
  modified_base 20: mod_base = OTHER; note = 2'-O-methyluridine-3'-phosphate
  modified_base 21: mod_base = OTHER; note = 2'-O-methylguanosine-3'-phosphorothioate
  modified_base 22: mod_base = OTHER; note = 2'-O-methyladenosine-3'-phosphorothioate
  modified_base 23: mod_base = OTHER; note = 2'-O-methylguanosine
tttagagtgaggattaaaatgag

SEQ ID NO: 208 - RNA, 23 nt, synthetic construct
  source 1..23: mol_type = other RNA
  modified_base 1: mod_base = OTHER; note = 2'-O-methyluridine-3'-phosphorothioate 5'-(cis-3-phenyl-1,2-dithiaspiro[4.4]nonan-4-yl thiophosphate)
  modified_base 2: mod_base = OTHER; note = 2'-deoxy-2'-fluorouridine-3'-phosphorothioate
  modified_base 3: mod_base = OTHER; note = 2'-O-methyluridine-3'-phosphate
  modified_base 4: mod_base = OTHER; note = 2'-O-methyladenosine-3'-phosphate
  modified_base 5: mod_base = OTHER; note = 2'-O-methylguanosine-3'-phosphate
  modified_base 6: mod_base = OTHER; note = 2'-deoxy-2'-fluoroadenosine-3'-phosphate
  modified_base 7: mod_base = OTHER; note = 2'-O-methylguanosine-3'-phosphate
  modified_base 8: mod_base = OTHER; note = 2'-deoxy-2'-fluorouridine-3'-phosphate
  modified_base 9: mod_base = OTHER; note = 2'-deoxy-2'-fluoroguanosine-3'-phosphate
  modified_base 10: mod_base = OTHER; note = 2'-O-methyladenosine-3'-phosphate
  modified_base 11: mod_base = OTHER; note = 2'-O-methylguanosine-3'-phosphate
  modified_base 12: mod_base = OTHER; note = 2'-O-methylguanosine-3'-phosphate
  modified_base 13: mod_base = OTHER; note = 2'-O-methyladenosine-3'-phosphate
  modified_base 14: mod_base = OTHER; note = 2'-deoxy-2'-fluorouridine-3'-phosphate
  modified_base 15: mod_base = OTHER; note = 2'-O-methyluridine-3'-phosphate
  modified_base 16: mod_base = OTHER; note = 2'-deoxy-2'-fluoroadenosine-3'-phosphate
  modified_base 17: mod_base = OTHER; note = 2'-O-methyladenosine-3'-phosphate
  modified_base 18: mod_base = OTHER; note = 2'-O-methyladenosine-3'-phosphate
  modified_base 19: mod_base = OTHER; note = 2'-O-methyladenosine-3'-phosphate
  modified_base 20: mod_base = OTHER; note = 2'-O-methyluridine-3'-phosphate
  modified_base 21: mod_base = OTHER; note = 2'-O-methylguanosine-3'-phosphorothioate
  modified_base 22: mod_base = OTHER; note = 2'-O-methyladenosine-3'-phosphorothioate
  modified_base 23: mod_base = OTHER; note = 2'-O-methylguanosine
tttagagtgaggattaaaatgag

SEQ ID NO: 209 - RNA, 23 nt, synthetic construct
  source 1..23: mol_type = other RNA
  modified_base 1: mod_base = OTHER; note = 2'-O-methyluridine-3'-phosphorothioate 5'-(cis-3-phenyl-1,2-dithiaspiro[4.5]decan-4-yl thiophosphate)
  modified_base 2: mod_base = OTHER; note = 2'-deoxy-2'-fluorouridine-3'-phosphorothioate
  modified_base 3: mod_base = OTHER; note = 2'-O-methyluridine-3'-phosphate
  modified_base 4: mod_base = OTHER; note = 2'-O-methyladenosine-3'-phosphate
  modified_base 5: mod_base = OTHER; note = 2'-O-methylguanosine-3'-phosphate
  modified_base 6: mod_base = OTHER; note = 2'-deoxy-2'-fluoroadenosine-3'-phosphate
  modified_base 7: mod_base = OTHER; note = 2'-O-methylguanosine-3'-phosphate
  modified_base 8: mod_base = OTHER; note = 2'-deoxy-2'-fluorouridine-3'-phosphate
  modified_base 9: mod_base = OTHER; note = 2'-deoxy-2'-fluoroguanosine-3'-phosphate
  modified_base 10: mod_base = OTHER; note = 2'-O-methyladenosine-3'-phosphate
  modified_base 11: mod_base = OTHER; note = 2'-O-methylguanosine-3'-phosphate
  modified_base 12: mod_base = OTHER; note = 2'-O-methylguanosine-3'-phosphate
  modified_base 13: mod_base = OTHER; note = 2'-O-methyladenosine-3'-phosphate
  modified_base 14: mod_base = OTHER; note = 2'-deoxy-2'-fluorouridine-3'-phosphate
  modified_base 15: mod_base = OTHER; note = 2'-O-methyluridine-3'-phosphate
  modified_base 16: mod_base = OTHER; note = 2'-deoxy-2'-fluoroadenosine-3'-phosphate
  modified_base 17: mod_base = OTHER; note = 2'-O-methyladenosine-3'-phosphate
  modified_base 18: mod_base = OTHER; note = 2'-O-methyladenosine-3'-phosphate
  modified_base 19: mod_base = OTHER; note = 2'-O-methyladenosine-3'-phosphate
  modified_base 20: mod_base = OTHER; note = 2'-O-methyluridine-3'-phosphate
  modified_base 21: mod_base = OTHER; note = 2'-O-methylguanosine-3'-phosphorothioate
  modified_base 22: mod_base = OTHER; note = 2'-O-methyladenosine-3'-phosphorothioate
  modified_base 23: mod_base = OTHER; note = 2'-O-methylguanosine
tttagagtgaggattaaaatgag

SEQ ID NO: 210 - RNA, 21 nt, synthetic construct
  source 1..21: mol_type = other RNA
  modified_base 1: mod_base = OTHER; note = 2'-O-methylcytidine-3'-phosphorothioate
  modified_base 2: mod_base = OTHER; note = 2'-O-methyladenosine-3'-phosphorothioate
  modified_base 3: mod_base = OTHER; note = 2'-O-methylcytidine-3'-phosphate
  modified_base 4: mod_base = OTHER; note = 2'-O-methyladenosine-3'-phosphate
  modified_base 5: mod_base = OTHER; note = 2'-O-methylguanosine-3'-phosphate
  modified_base 6: mod_base = OTHER; note = 2'-O-methyladenosine-3'-phosphate
  modified_base 7: mod_base = OTHER; note = 2'-deoxy-2'-fluoroadenosine-3'-phosphate
  modified_base 8: mod_base = OTHER; note = 2'-O-methyladenosine-3'-phosphate
  modified_base 9: mod_base = OTHER; note = 2'-deoxy-2'-fluorocytidine-3'-phosphate
  modified_base 10: mod_base = OTHER; note = 2'-deoxy-2'-fluorouridine-3'-phosphate
  modified_base 11: mod_base = OTHER; note = 2'-deoxy-2'-fluorocytidine-3'-phosphate
  modified_base 12: mod_base = OTHER; note = 2'-O-methyladenosine-3'-phosphate
  modified_base 13: mod_base = OTHER; note = 2'-O-methyladenosine-3'-phosphate
  modified_base 14: mod_base = OTHER; note = 2'-O-methyluridine-3'-phosphate
  modified_base 15: mod_base = OTHER; note = 2'-O-methyladenosine-3'-phosphate
  modified_base 16: mod_base = OTHER; note = 2'-O-methyladenosine-3'-phosphate
  modified_base 17: mod_base = OTHER; note = 2'-O-methyladenosine-3'-phosphate
  modified_base 18: mod_base = OTHER; note = 2'-O-methylguanosine-3'-phosphate
  modified_base 19: mod_base = OTHER; note = 2'-O-methyluridine-3'-phosphate
  modified_base 20: mod_base = OTHER; note = 2'-O-methylguanosine-3'-phosphate
  modified_base 21: mod_base = OTHER; note = 2'-O-methyladenosine-3'-phosphate ((2S,4R)-1-[29-[[2-(acetylamino)-2-deoxy-beta-D-galactopyra nosyl]oxy]-14,14-bis[[3-[[3-[[5-[[2-(acetylamino)-2-deoxy-b eta-D-galactopyranosyl]oxy]-1-oxopentyl]amino]propyl]amino] -3-oxopropoxy]methyl]-1,12,19,25-tetraoxo-16-oxa-13,20,24-t riazanonacos-1-yl]-4-hydroxy-2-pyrrolidinyl)methyl ester
cacagaaactcaataaagtga

SEQ ID NO: 211 - RNA, 23 nt, synthetic construct
  source 1..23: mol_type = other RNA
  modified_base 1: mod_base = OTHER; note = 2'-O-methyluridine-3'-phosphorothioate
  modified_base 2: mod_base = OTHER; note = 2'-deoxy-2'-fluorocytidine-3'-phosphorothioate
  modified_base 3: mod_base = OTHER; note = 2'-O-methyladenosine-3'-phosphate
  modified_base 4: mod_base = OTHER; note = 2'-O-methylcytidine-3'-phosphate
  modified_base 5: mod_base = OTHER; note = 2'-O-methyluridine-3'-phosphate
  modified_base 6: mod_base = OTHER; note = 2'-deoxy-2'-fluorouridine-3'-phosphate
  modified_base 7: mod_base = OTHER; note = 2'-O-methyluridine-3'-phosphate
  modified_base 8: mod_base = OTHER; note = 2'-deoxy-2'-fluoroadenosine-3'-phosphate
  modified_base 9: mod_base = OTHER; note = 2'-deoxy-2'-fluorouridine-3'-phosphate
  modified_base 10: mod_base = OTHER; note = 2'-O-methyluridine-3'-phosphate
  modified_base 11: mod_base = OTHER; note = 2'-O-methylguanosine-3'-phosphate
  modified_base 12: mod_base = OTHER; note = 2'-O-methyladenosine-3'-phosphate
  modified_base 13: mod_base = OTHER; note = 2'-O-methylguanosine-3'-phosphate
  modified_base 14: mod_base = OTHER; note = 2'-deoxy-2'-fluorouridine-3'-phosphate
  modified_base 15: mod_base = OTHER; note = 2'-O-methyluridine-3'-phosphate
  modified_base 16: mod_base = OTHER; note = 2'-deoxy-2'-fluorouridine-3'-phosphate
  modified_base 17: mod_base = OTHER; note = 2'-O-methylcytidine-3'-phosphate
  modified_base 18: mod_base = OTHER; note = 2'-O-methyluridine-3'-phosphate
  modified_base 19: mod_base = OTHER; note = 2'-O-methylguanosine-3'-phosphate
  modified_base 20: mod_base = OTHER; note = 2'-O-methyluridine-3'-phosphate
  modified_base 21: mod_base = OTHER; note = 2'-O-methylguanosine-3'-phosphorothioate
  modified_base 22: mod_base = OTHER; note = 2'-O-methylcytidine-3'-phosphorothioate
  modified_base 23: mod_base = OTHER; note = 2'-O-methylcytidine
tcactttattgagtttctgtgcc

SEQ ID NO: 212 - RNA, 21 nt, synthetic construct
  source 1..21: mol_type = other RNA
  modified_base 1: mod_base = OTHER; note = 2'-O-methylcytidine-3'-phosphorothioate
  modified_base 2: mod_base = OTHER; note = 2'-O-methyladenosine-3'-phosphorothioate
  modified_base 3: mod_base = OTHER; note = 2'-O-methylcytidine-3'-phosphate
  modified_base 4: mod_base = OTHER; note = 2'-O-methyladenosine-3'-phosphate
  modified_base 5: mod_base = OTHER; note = 2'-O-methylguanosine-3'-phosphate
  modified_base 6: mod_base = OTHER; note = 2'-O-methyladenosine-3'-phosphate
  modified_base 7: mod_base = OTHER; note = 2'-deoxy-2'-fluoroadenosine-3'-phosphate
  modified_base 8: mod_base = OTHER; note = 2'-O-methyladenosine-3'-phosphate
  modified_base 9: mod_base = OTHER; note = 2'-deoxy-2'-fluorocytidine-3'-phosphate
  modified_base 10: mod_base = OTHER; note = 2'-deoxy-2'-fluorouridine-3'-phosphate
  modified_base 11: mod_base = OTHER; note = 2'-deoxy-2'-fluorocytidine-3'-phosphate
  modified_base 12: mod_base = OTHER; note = 2'-O-methyladenosine-3'-phosphate
  modified_base 13: mod_base = OTHER; note = 2'-O-methyladenosine-3'-phosphate
  modified_base 14: mod_base = OTHER; note = 2'-O-methyluridine-3'-phosphate
  modified_base 15: mod_base = OTHER; note = 2'-O-methyladenosine-3'-phosphate
  modified_base 16: mod_base = OTHER; note = 2'-O-methyladenosine-3'-phosphate
  modified_base 17: mod_base = OTHER; note = 2'-O-methyladenosine-3'-phosphate
  modified_base 18: mod_base = OTHER; note = 2'-O-methylguanosine-3'-phosphate
  modified_base 19: mod_base = OTHER; note = 2'-O-methyluridine-3'-phosphate
  modified_base 20: mod_base = OTHER; note = 2'-O-methylguanosine-3'-phosphate
  modified_base 21: mod_base = OTHER; note = 2'-O-methyladenosine-3'-phosphate ((2S,4R)-1-[29-[[2-(acetylamino)-2-deoxy-beta-D-galactopyra nosyl]oxy]-14,14-bis[[3-[[3-[[5-[[2-(acetylamino)-2-deoxy-b eta-D-galactopyranosyl]oxy]-1-oxopentyl]amino]propyl]amino] -3-oxopropoxy]methyl]-1,12,19,25-tetraoxo-16-oxa-13,20,24-t riazanonacos-1-yl]-4-hydroxy-2-pyrrolidinyl)methyl ester
cacagaaactcaataaagtga

SEQ ID NO: 213 - RNA, 23 nt, synthetic construct
  source 1..23: mol_type = other RNA
  modified_base 1: mod_base = OTHER; note = 2'-O-methyluridine-3'-phosphate 5'-(E)-Vinylphosphonate
  modified_base 2: mod_base = OTHER; note = 2'-deoxy-2'-fluorocytidine-3'-phosphate
  modified_base 3: mod_base = OTHER; note = 2'-O-methyladenosine-3'-phosphate
  modified_base 4: mod_base = OTHER; note = 2'-O-methylcytidine-3'-phosphate
  modified_base 5: mod_base = OTHER; note = 2'-O-methyluridine-3'-phosphate
  modified_base 6: mod_base = OTHER; note = 2'-deoxy-2'-fluorouridine-3'-phosphate
  modified_base 7: mod_base = OTHER; note = 2'-O-methyluridine-3'-phosphate
  modified_base 8: mod_base = OTHER; note = 2'-deoxy-2'-fluoroadenosine-3'-phosphate
  modified_base 9: mod_base = OTHER; note = 2'-deoxy-2'-fluorouridine-3'-phosphate
  modified_base 10: mod_base = OTHER; note = 2'-O-methyluridine-3'-phosphate
  modified_base 11: mod_base = OTHER; note = 2'-O-methylguanosine-3'-phosphate
  modified_base 12: mod_base = OTHER; note = 2'-O-methyladenosine-3'-phosphate
  modified_base 13: mod_base = OTHER; note = 2'-O-methylguanosine-3'-phosphate
  modified_base 14: mod_base = OTHER; note = 2'-deoxy-2'-fluorouridine-3'-phosphate
  modified_base 15: mod_base = OTHER; note = 2'-O-methyluridine-3'-phosphate
  modified_base 16: mod_base = OTHER; note = 2'-deoxy-2'-fluorouridine-3'-phosphate
  modified_base 17: mod_base = OTHER; note = 2'-O-methylcytidine-3'-phosphate
  modified_base 18: mod_base = OTHER; note = 2'-O-methyluridine-3'-phosphate
  modified_base 19: mod_base = OTHER; note = 2'-O-methylguanosine-3'-phosphate
  modified_base 20: mod_base = OTHER; note = 2'-O-methyluridine-3'-phosphate
  modified_base 21: mod_base = OTHER; note = 2'-O-methylguanosine-3'-phosphorothioate
  modified_base 22: mod_base = OTHER; note = 2'-O-methylcytidine-3'-phosphorothioate
  modified_base 23: mod_base = OTHER; note = 2'-O-methylcytidine
tcactttattgagtttctgtgcc

SEQ ID NO: 214 - RNA, 21 nt, synthetic construct
  source 1..21: mol_type = other RNA
  modified_base 1: mod_base = OTHER; note = 2'-O-methylcytidine-3'-phosphorothioate
  modified_base 2: mod_base = OTHER; note = 2'-O-methyladenosine-3'-phosphorothioate
  modified_base 3: mod_base = OTHER; note = 2'-O-methylcytidine-3'-phosphate
  modified_base 4: mod_base = OTHER; note = 2'-O-methyladenosine-3'-phosphate
  modified_base 5: mod_base = OTHER; note = 2'-O-methylguanosine-3'-phosphate
  modified_base 6: mod_base = OTHER; note = 2'-O-methyladenosine-3'-phosphate
  modified_base 7: mod_base = OTHER; note = 2'-deoxy-2'-fluoroadenosine-3'-phosphate
  modified_base 8: mod_base = OTHER; note = 2'-O-methyladenosine-3'-phosphate
  modified_base 9: mod_base = OTHER; note = 2'-deoxy-2'-fluorocytidine-3'-phosphate
  modified_base 10: mod_base = OTHER; note = 2'-deoxy-2'-fluorouridine-3'-phosphate
  modified_base 11: mod_base = OTHER; note = 2'-deoxy-2'-fluorocytidine-3'-phosphate
  modified_base 12: mod_base = OTHER; note = 2'-O-methyladenosine-3'-phosphate
  modified_base 13: mod_base = OTHER; note = 2'-O-methyladenosine-3'-phosphate
  modified_base 14: mod_base = OTHER; note = 2'-O-methyluridine-3'-phosphate
  modified_base 15: mod_base = OTHER; note = 2'-O-methyladenosine-3'-phosphate
  modified_base 16: mod_base = OTHER; note = 2'-O-methyladenosine-3'-phosphate
  modified_base 17: mod_base = OTHER; note = 2'-O-methyladenosine-3'-phosphate
  modified_base 18: mod_base = OTHER; note = 2'-O-methylguanosine-3'-phosphate
  modified_base 19: mod_base = OTHER; note = 2'-O-methyluridine-3'-phosphate
  modified_base 20: mod_base = OTHER; note = 2'-O-methylguanosine-3'-phosphate
  modified_base 21: mod_base = OTHER; note = 2'-O-methyladenosine-3'-phosphate ((2S,4R)-1-[29-[[2-(acetylamino)-2-deoxy-beta-D-galactopyra nosyl]oxy]-14,14-bis[[3-[[3-[[5-[[2-(acetylamino)-2-deoxy-b eta-D-galactopyranosyl]oxy]-1-oxopentyl]amino]propyl]amino] -3-oxopropoxy]methyl]-1,12,19,25-tetraoxo-16-oxa-13,20,24-t riazanonacos-1-yl]-4-hydroxy-2-pyrrolidinyl)methyl ester
cacagaaactcaataaagtga

SEQ ID NO: 215 - RNA, 23 nt, synthetic construct
  source 1..23: mol_type = other RNA
  modified_base 1: mod_base = OTHER; note = 2'-O-methyluridine-3'-phosphorothioate 5'-(cis-3,3,5-trimethyl-1,2-dithiolan-4-yl thiophosphate)
  modified_base 2: mod_base = OTHER; note = 2'-deoxy-2'-fluorocytidine-3'-phosphorothioate
  modified_base 3: mod_base = OTHER; note = 2'-O-methyladenosine-3'-phosphate
  modified_base 4: mod_base = OTHER; note = 2'-O-methylcytidine-3'-phosphate
  modified_base 5: mod_base = OTHER; note = 2'-O-methyluridine-3'-phosphate
  modified_base 6: mod_base = OTHER; note = 2'-deoxy-2'-fluorouridine-3'-phosphate
  modified_base 7: mod_base = OTHER; note = 2'-O-methyluridine-3'-phosphate
  modified_base 8: mod_base = OTHER; note = 2'-deoxy-2'-fluoroadenosine-3'-phosphate
  modified_base 9: mod_base = OTHER; note = 2'-deoxy-2'-fluorouridine-3'-phosphate
  modified_base 10: mod_base = OTHER; note = 2'-O-methyluridine-3'-phosphate
  modified_base 11: mod_base = OTHER; note = 2'-O-methylguanosine-3'-phosphate
  modified_base 12: mod_base = OTHER; note = 2'-O-methyladenosine-3'-phosphate
  modified_base 13: mod_base = OTHER; note = 2'-O-methylguanosine-3'-phosphate
  modified_base 14: mod_base = OTHER; note = 2'-deoxy-2'-fluorouridine-3'-phosphate
  modified_base 15: mod_base = OTHER; note = 2'-O-methyluridine-3'-phosphate
  modified_base 16: mod_base = OTHER; note = 2'-deoxy-2'-fluorouridine-3'-phosphate
  modified_base 17: mod_base = OTHER; note = 2'-O-methylcytidine-3'-phosphate
  modified_base 18: mod_base = OTHER; note = 2'-O-methyluridine-3'-phosphate
  modified_base 19: mod_base = OTHER; note = 2'-O-methylguanosine-3'-phosphate
  modified_base 20: mod_base = OTHER; note = 2'-O-methyluridine-3'-phosphate
  modified_base 21: mod_base = OTHER; note = 2'-O-methylguanosine-3'-phosphorothioate
  modified_base 22: mod_base = OTHER; note = 2'-O-methylcytidine-3'-phosphorothioate
  modified_base 23: mod_base = OTHER; note = 2'-O-methylcytidine
tcactttattgagtttctgtgcc

SEQ ID NO: 216 - RNA, 21 nt, synthetic construct
  source 1..21: mol_type = other RNA
  modified_base 1: mod_base = OTHER; note = 2'-O-methylcytidine-3'-phosphorothioate
  modified_base 2: mod_base = OTHER; note = 2'-O-methyladenosine-3'-phosphorothioate
  modified_base 3: mod_base = OTHER; note = 2'-O-methylcytidine-3'-phosphate
  modified_base 4: mod_base = OTHER; note = 2'-O-methyladenosine-3'-phosphate
  modified_base 5: mod_base = OTHER; note = 2'-O-methylguanosine-3'-phosphate
  modified_base 6: mod_base = OTHER; note = 2'-O-methyladenosine-3'-phosphate
  modified_base 7: mod_base = OTHER; note = 2'-deoxy-2'-fluoroadenosine-3'-phosphate
  modified_base 8: mod_base = OTHER; note = 2'-O-methyladenosine-3'-phosphate
  modified_base 9: mod_base = OTHER; note = 2'-deoxy-2'-fluorocytidine-3'-phosphate
  modified_base 10: mod_base = OTHER; note = 2'-deoxy-2'-fluorouridine-3'-phosphate
  modified_base 11: mod_base = OTHER; note = 2'-deoxy-2'-fluorocytidine-3'-phosphate
  modified_base 12: mod_base = OTHER; note = 2'-O-methyladenosine-3'-phosphate
  modified_base 13: mod_base = OTHER; note = 2'-O-methyladenosine-3'-phosphate
  modified_base 14: mod_base = OTHER; note = 2'-O-methyluridine-3'-phosphate
  modified_base 15: mod_base = OTHER; note = 2'-O-methyladenosine-3'-phosphate
  modified_base 16: mod_base = OTHER; note = 2'-O-methyladenosine-3'-phosphate
  modified_base 17: mod_base = OTHER; note = 2'-O-methyladenosine-3'-phosphate
  modified_base 18: mod_base = OTHER; note = 2'-O-methylguanosine-3'-phosphate
  modified_base 19: mod_base = OTHER; note = 2'-O-methyluridine-3'-phosphate
  modified_base 20: mod_base = OTHER; note = 2'-O-methylguanosine-3'-phosphate
  modified_base 21: mod_base = OTHER; note = 2'-O-methyladenosine-3'-phosphate ((2S,4R)-1-[29-[[2-(acetylamino)-2-deoxy-beta-D-galactopyra nosyl]oxy]-14,14-bis[[3-[[3-[[5-[[2-(acetylamino)-2-deoxy-b eta-D-galactopyranosyl]oxy]-1-oxopentyl]amino]propyl]amino] -3-oxopropoxy]methyl]-1,12,19,25-tetraoxo-16-oxa-13,20,24-t riazanonacos-1-yl]-4-hydroxy-2-pyrrolidinyl)methyl ester
cacagaaactcaataaagtga

SEQ ID NO: 217 - RNA, 23 nt, synthetic construct
  source 1..23: mol_type = other RNA
  modified_base 1: mod_base = OTHER; note = 2'-O-methyluridine-3'-phosphorothioate 5'-(trans-3,3,5-trimethyl-1,2-dithiolan-4-yl thiophosphate)
  modified_base 2: mod_base = OTHER; note = 2'-deoxy-2'-fluorocytidine-3'-phosphorothioate
  modified_base 3: mod_base = OTHER; note = 2'-O-methyladenosine-3'-phosphate
  modified_base 4: mod_base = OTHER; note = 2'-O-methylcytidine-3'-phosphate
  modified_base 5: mod_base = OTHER; note = 2'-O-methyluridine-3'-phosphate
  modified_base 6: mod_base = OTHER; note = 2'-deoxy-2'-fluorouridine-3'-phosphate
  modified_base 7: mod_base = OTHER; note = 2'-O-methyluridine-3'-phosphate
  modified_base 8: mod_base = OTHER; note = 2'-deoxy-2'-fluoroadenosine-3'-phosphate
  modified_base 9: mod_base = OTHER; note = 2'-deoxy-2'-fluorouridine-3'-phosphate
  modified_base 10: mod_base = OTHER; note = 2'-O-methyluridine-3'-phosphate
  modified_base 11: mod_base = OTHER; note = 2'-O-methylguanosine-3'-phosphate
  modified_base 12: mod_base = OTHER; note = 2'-O-methyladenosine-3'-phosphate
  modified_base 13: mod_base = OTHER; note = 2'-O-methylguanosine-3'-phosphate
  modified_base 14: mod_base = OTHER; note = 2'-deoxy-2'-fluorouridine-3'-phosphate
  modified_base 15: mod_base = OTHER; note = 2'-O-methyluridine-3'-phosphate
  modified_base 16: mod_base = OTHER; note = 2'-deoxy-2'-fluorouridine-3'-phosphate
  modified_base 17: mod_base = OTHER; note = 2'-O-methylcytidine-3'-phosphate
  modified_base 18: mod_base = OTHER; note = 2'-O-methyluridine-3'-phosphate
  modified_base 19: mod_base = OTHER; note = 2'-O-methylguanosine-3'-phosphate
  modified_base 20: mod_base = OTHER; note = 2'-O-methyluridine-3'-phosphate
  modified_base 21: mod_base = OTHER; note = 2'-O-methylguanosine-3'-phosphorothioate
  modified_base 22: mod_base = OTHER; note = 2'-O-methylcytidine-3'-phosphorothioate
  modified_base 23: mod_base = OTHER; note = 2'-O-methylcytidine
tcactttattgagtttctgtgcc

SEQ ID NO: 218 - RNA, 21 nt, synthetic construct
  source 1..21: mol_type = other RNA
  modified_base 1: mod_base = OTHER; note = 2'-O-methylcytidine-3'-phosphorothioate
  modified_base 2: mod_base = OTHER; note = 2'-O-methyladenosine-3'-phosphorothioate
  modified_base 3: mod_base = OTHER; note = 2'-O-methylcytidine-3'-phosphate
  modified_base 4: mod_base = OTHER; note = 2'-O-methyladenosine-3'-phosphate
  modified_base 5: mod_base = OTHER; note = 2'-O-methylguanosine-3'-phosphate
  modified_base 6: mod_base = OTHER; note = 2'-O-methyladenosine-3'-phosphate
  modified_base 7: mod_base = OTHER; note = 2'-deoxy-2'-fluoroadenosine-3'-phosphate
  modified_base 8: mod_base = OTHER; note = 2'-O-methyladenosine-3'-phosphate
  modified_base 9: mod_base = OTHER; note = 2'-deoxy-2'-fluorocytidine-3'-phosphate
  modified_base 10: mod_base = OTHER; note = 2'-deoxy-2'-fluorouridine-3'-phosphate
  modified_base 11: mod_base = OTHER; note = 2'-deoxy-2'-fluorocytidine-3'-phosphate
  modified_base 12: mod_base = OTHER; note = 2'-O-methyladenosine-3'-phosphate
  modified_base 13: mod_base = OTHER; note = 2'-O-methyladenosine-3'-phosphate
  modified_base 14: mod_base = OTHER; note = 2'-O-methyluridine-3'-phosphate
  modified_base 15: mod_base = OTHER; note = 2'-O-methyladenosine-3'-phosphate
  modified_base 16: mod_base = OTHER; note = 2'-O-methyladenosine-3'-phosphate
  modified_base 17: mod_base = OTHER; note = 2'-O-methyladenosine-3'-phosphate
  modified_base 18: mod_base = OTHER; note = 2'-O-methylguanosine-3'-phosphate
  modified_base 19: mod_base = OTHER; note = 2'-O-methyluridine-3'-phosphate
  modified_base 20: mod_base = OTHER; note = 2'-O-methylguanosine-3'-phosphate
  modified_base 21: mod_base = OTHER; note = 2'-O-methyladenosine-3'-phosphate ((2S,4R)-1-[29-[[2-(acetylamino)-2-deoxy-beta-D-galactopyra nosyl]oxy]-14,14-bis[[3-[[3-[[5-[[2-(acetylamino)-2-deoxy-b eta-D-galactopyranosyl]oxy]-1-oxopentyl]amino]propyl]amino] -3-oxopropoxy]methyl]-1,12,19,25-tetraoxo-16-oxa-13,20,24-t riazanonacos-1-yl]-4-hydroxy-2-pyrrolidinyl)methyl ester
cacagaaactcaataaagtga

SEQ ID NO: 219 - RNA, 23 nt, synthetic construct
  source 1..23: mol_type = other RNA
  modified_base 1: mod_base = OTHER; note = 2'-O-methyluridine-3'-phosphorothioate 5'-(3,3,5S-trimethyl-1,2-dithiolan-4R-yl thiophosphate)
  modified_base 2: mod_base = OTHER; note = 2'-deoxy-2'-fluorocytidine-3'-phosphorothioate
  modified_base 3: mod_base = OTHER; note = 2'-O-methyladenosine-3'-phosphate
  modified_base 4: mod_base = OTHER; note = 2'-O-methylcytidine-3'-phosphate
  modified_base 5: mod_base = OTHER; note = 2'-O-methyluridine-3'-phosphate
  modified_base 6: mod_base = OTHER; note = 2'-deoxy-2'-fluorouridine-3'-phosphate
  modified_base 7: mod_base = OTHER; note = 2'-O-methyluridine-3'-phosphate
  modified_base 8: mod_base = OTHER; note = 2'-deoxy-2'-fluoroadenosine-3'-phosphate
  modified_base 9: mod_base = OTHER; note = 2'-deoxy-2'-fluorouridine-3'-phosphate
  modified_base 10: mod_base = OTHER; note = 2'-O-methyluridine-3'-phosphate
  modified_base 11: mod_base = OTHER; note = 2'-O-methylguanosine-3'-phosphate
  modified_base 12: mod_base = OTHER; note = 2'-O-methyladenosine-3'-phosphate
  modified_base 13: mod_base = OTHER; note = 2'-O-methylguanosine-3'-phosphate
  modified_base 14: mod_base = OTHER; note = 2'-deoxy-2'-fluorouridine-3'-phosphate
  modified_base 15: mod_base = OTHER; note = 2'-O-methyluridine-3'-phosphate
  modified_base 16: mod_base = OTHER; note = 2'-deoxy-2'-fluorouridine-3'-phosphate
  modified_base 17: mod_base = OTHER; note = 2'-O-methylcytidine-3'-phosphate
  modified_base 18: mod_base = OTHER; note = 2'-O-methyluridine-3'-phosphate
  modified_base 19: mod_base = OTHER; note = 2'-O-methylguanosine-3'-phosphate
  modified_base 20: mod_base = OTHER; note = 2'-O-methyluridine-3'-phosphate
  modified_base 21: mod_base = OTHER; note = 2'-O-methylguanosine-3'-phosphorothioate
  modified_base 22: mod_base = OTHER; note = 2'-O-methylcytidine-3'-phosphorothioate
  modified_base 23: mod_base = OTHER; note = 2'-O-methylcytidine
tcactttattgagtttctgtgcc

SEQ ID NO: 220 - RNA, 21 nt, synthetic construct
  source 1..21: mol_type = other RNA
  modified_base 1: mod_base = OTHER; note = 2'-O-methylcytidine-3'-phosphorothioate
  modified_base 2: mod_base = OTHER; note = 2'-O-methyladenosine-3'-phosphorothioate
  modified_base 3: mod_base = OTHER; note = 2'-O-methylcytidine-3'-phosphate
  modified_base 4: mod_base = OTHER; note = 2'-O-methyladenosine-3'-phosphate
  modified_base 5: mod_base = OTHER; note = 2'-O-methylguanosine-3'-phosphate
  modified_base 6: mod_base = OTHER; note = 2'-O-methyladenosine-3'-phosphate
  modified_base 7: mod_base = OTHER; note = 2'-deoxy-2'-fluoroadenosine-3'-phosphate
  modified_base 8: mod_base = OTHER; note = 2'-O-methyladenosine-3'-phosphate
  modified_base 9: mod_base = OTHER; note = 2'-deoxy-2'-fluorocytidine-3'-phosphate
  modified_base 10: mod_base = OTHER; note = 2'-deoxy-2'-fluorouridine-3'-phosphate
  modified_base 11: mod_base = OTHER; note = 2'-deoxy-2'-fluorocytidine-3'-phosphate
  modified_base 12: mod_base = OTHER; note = 2'-O-methyladenosine-3'-phosphate
  modified_base 13: mod_base = OTHER; note = 2'-O-methyladenosine-3'-phosphate
  modified_base 14: mod_base = OTHER; note = 2'-O-methyluridine-3'-phosphate
  modified_base 15: mod_base = OTHER; note = 2'-O-methyladenosine-3'-phosphate
  modified_base 16: mod_base = OTHER; note = 2'-O-methyladenosine-3'-phosphate
  modified_base 17: mod_base = OTHER; note = 2'-O-methyladenosine-3'-phosphate
  modified_base 18: mod_base = OTHER; note = 2'-O-methylguanosine-3'-phosphate
  modified_base 19: mod_base = OTHER; note = 2'-O-methyluridine-3'-phosphate
  modified_base 20: mod_base = OTHER; note = 2'-O-methylguanosine-3'-phosphate
  modified_base 21: mod_base = OTHER; note = 2'-O-methyladenosine-3'-phosphate ((2S,4R)-1-[29-[[2-(acetylamino)-2-deoxy-beta-D-galactopyra nosyl]oxy]-14,14-bis[[3-[[3-[[5-[[2-(acetylamino)-2-deoxy-b eta-D-galactopyranosyl]oxy]-1-oxopentyl]amino]propyl]amino] -3-oxopropoxy]methyl]-1,12,19,25-tetraoxo-16-oxa-13,20,24-t riazanonacos-1-yl]-4-hydroxy-2-pyrrolidinyl)methyl ester
cacagaaactcaataaagtga

SEQ ID NO: 221 - RNA, 23 nt, synthetic construct
  source 1..23: mol_type = other RNA
  modified_base 1: mod_base = OTHER; note = 2'-O-methyluridine-3'-phosphorothioate 5'-(3,3,5R-trimethyl-1,2-dithiolan-4S-yl thiophosphate)
  modified_base 2: mod_base = OTHER; note = 2'-deoxy-2'-fluorocytidine-3'-phosphorothioate
  modified_base 3: mod_base = OTHER; note = 2'-O-methyladenosine-3'-phosphate
  modified_base 4: mod_base = OTHER; note = 2'-O-methylcytidine-3'-phosphate
  modified_base 5: mod_base = OTHER; note = 2'-O-methyluridine-3'-phosphate
  modified_base 6: mod_base = OTHER; note = 2'-deoxy-2'-fluorouridine-3'-phosphate
  modified_base 7: mod_base = OTHER; note = 2'-O-methyluridine-3'-phosphate
  modified_base 8: mod_base = OTHER; note = 2'-deoxy-2'-fluoroadenosine-3'-phosphate
  modified_base 9: mod_base = OTHER; note = 2'-deoxy-2'-fluorouridine-3'-phosphate
  modified_base 10: mod_base = OTHER; note = 2'-O-methyluridine-3'-phosphate
  modified_base 11: mod_base = OTHER; note = 2'-O-methylguanosine-3'-phosphate
  modified_base 12: mod_base = OTHER; note = 2'-O-methyladenosine-3'-phosphate
  modified_base 13: mod_base = OTHER; note = 2'-O-methylguanosine-3'-phosphate
  modified_base 14: mod_base = OTHER; note = 2'-deoxy-2'-fluorouridine-3'-phosphate
  modified_base 15: mod_base = OTHER; note = 2'-O-methyluridine-3'-phosphate
  modified_base 16: mod_base = OTHER; note = 2'-deoxy-2'-fluorouridine-3'-phosphate
  modified_base 17: mod_base = OTHER; note = 2'-O-methylcytidine-3'-phosphate
  modified_base 18: mod_base = OTHER; note = 2'-O-methyluridine-3'-phosphate
  modified_base 19: mod_base = OTHER; note = 2'-O-methylguanosine-3'-phosphate
  modified_base 20: mod_base = OTHER; note = 2'-O-methyluridine-3'-phosphate
  modified_base 21: mod_base = OTHER; note = 2'-O-methylguanosine-3'-phosphorothioate
  modified_base 22: mod_base = OTHER; note = 2'-O-methylcytidine-3'-phosphorothioate
  modified_base 23: mod_base = OTHER; note = 2'-O-methylcytidine
tcactttattgagtttctgtgcc

SEQ ID NO: 222 - RNA, 21 nt, synthetic construct
  source 1..21: mol_type = other RNA
  modified_base 1: mod_base = OTHER; note = 2'-O-methylcytidine-3'-phosphorothioate
  modified_base 2: mod_base = OTHER; note = 2'-O-methyladenosine-3'-phosphorothioate
  modified_base 3: mod_base = OTHER; note = 2'-O-methylcytidine-3'-phosphate
  modified_base 4: mod_base = OTHER; note = 2'-O-methyladenosine-3'-phosphate
  modified_base 5: mod_base = OTHER; note = 2'-O-methylguanosine-3'-phosphate
  modified_base 6: mod_base = OTHER; note = 2'-O-methyladenosine-3'-phosphate
  modified_base 7: mod_base = OTHER; note = 2'-deoxy-2'-fluoroadenosine-3'-phosphate
  modified_base 8: mod_base = OTHER; note = 2'-O-methyladenosine-3'-phosphate
  modified_base 9: mod_base = OTHER; note = 2'-deoxy-2'-fluorocytidine-3'-phosphate
  modified_base 10: mod_base = OTHER; note = 2'-deoxy-2'-fluorouridine-3'-phosphate
  modified_base 11: mod_base = OTHER; note = 2'-deoxy-2'-fluorocytidine-3'-phosphate
  modified_base 12: mod_base = OTHER; note = 2'-O-methyladenosine-3'-phosphate
  modified_base 13: mod_base = OTHER; note = 2'-O-methyladenosine-3'-phosphate
  modified_base 14: mod_base = OTHER; note = 2'-O-methyluridine-3'-phosphate
  modified_base 15: mod_base = OTHER; note = 2'-O-methyladenosine-3'-phosphate
  modified_base 16: mod_base = OTHER; note = 2'-O-methyladenosine-3'-phosphate
  modified_base 17: mod_base = OTHER; note = 2'-O-methyladenosine-3'-phosphate
  modified_base 18: mod_base = OTHER; note = 2'-O-methylguanosine-3'-phosphate
  modified_base 19: mod_base = OTHER; note = 2'-O-methyluridine-3'-phosphate
  modified_base 20: mod_base = OTHER; note = 2'-O-methylguanosine-3'-phosphate
  modified_base 21: mod_base = OTHER; note = 2'-O-methyladenosine-3'-phosphate ((2S,4R)-1-[29-[[2-(acetylamino)-2-deoxy-beta-D-galactopyra nosyl]oxy]-14,14-bis[[3-[[3-[[5-[[2-(acetylamino)-2-deoxy-b eta-D-galactopyranosyl]oxy]-1-oxopentyl]amino]propyl]amino] -3-oxopropoxy]methyl]-1,12,19,25-tetraoxo-16-oxa-13,20,24-t riazanonacos-1-yl]-4-hydroxy-2-pyrrolidinyl)methyl ester
cacagaaactcaataaagtga

SEQ ID NO: 223 - RNA, 23 nt, synthetic construct
  source 1..23: mol_type = other RNA
  modified_base 1: mod_base = OTHER; note = 2'-O-methyluridine-3'-phosphorothioate 5'-(3,3,5R-trimethyl-1,2-dithiolan-4R-yl thiophosphate)
  modified_base 2: mod_base = OTHER; note = 2'-deoxy-2'-fluorocytidine-3'-phosphorothioate
  modified_base 3: mod_base = OTHER; note = 2'-O-methyladenosine-3'-phosphate
  modified_base 4: mod_base = OTHER; note = 2'-O-methylcytidine-3'-phosphate
  modified_base 5: mod_base = OTHER; note = 2'-O-methyluridine-3'-phosphate
  modified_base 6: mod_base = OTHER; note = 2'-deoxy-2'-fluorouridine-3'-phosphate
  modified_base 7: mod_base = OTHER; note = 2'-O-methyluridine-3'-phosphate
  modified_base 8: mod_base = OTHER; note = 2'-deoxy-2'-fluoroadenosine-3'-phosphate
  modified_base 9: mod_base = OTHER; note = 2'-deoxy-2'-fluorouridine-3'-phosphate
  modified_base 10: mod_base = OTHER; note = 2'-O-methyluridine-3'-phosphate
  modified_base 11: mod_base = OTHER; note = 2'-O-methylguanosine-3'-phosphate
  modified_base 12: mod_base = OTHER; note = 2'-O-methyladenosine-3'-phosphate
  modified_base 13: mod_base = OTHER; note = 2'-O-methylguanosine-3'-phosphate
  modified_base 14: mod_base = OTHER; note = 2'-deoxy-2'-fluorouridine-3'-phosphate
  modified_base 15: mod_base = OTHER; note = 2'-O-methyluridine-3'-phosphate
  modified_base 16: mod_base = OTHER; note = 2'-deoxy-2'-fluorouridine-3'-phosphate
  modified_base 17: mod_base = OTHER; note = 2'-O-methylcytidine-3'-phosphate
  modified_base 18: mod_base = OTHER; note = 2'-O-methyluridine-3'-phosphate
  modified_base 19: mod_base = OTHER; note = 2'-O-methylguanosine-3'-phosphate
  modified_base 20: mod_base = OTHER; note = 2'-O-methyluridine-3'-phosphate
  modified_base 21: mod_base = OTHER; note = 2'-O-methylguanosine-3'-phosphorothioate
  modified_base 22: mod_base = OTHER; note = 2'-O-methylcytidine-3'-phosphorothioate
  modified_base 23: mod_base = OTHER; note = 2'-O-methylcytidine
tcactttattgagtttctgtgcc

SEQ ID NO: 224 - RNA, 21 nt, synthetic construct
  source 1..21: mol_type = other RNA
  modified_base 1: mod_base = OTHER; note = 2'-O-methylcytidine-3'-phosphorothioate
  modified_base 2: mod_base = OTHER; note = 2'-O-methyladenosine-3'-phosphorothioate
  modified_base 3: mod_base = OTHER; note = 2'-O-methylcytidine-3'-phosphate
  modified_base 4: mod_base = OTHER; note = 2'-O-methyladenosine-3'-phosphate
  modified_base 5: mod_base = OTHER; note = 2'-O-methylguanosine-3'-phosphate
  modified_base 6: mod_base = OTHER; note = 2'-O-methyladenosine-3'-phosphate
  modified_base 7: mod_base = OTHER; note = 2'-deoxy-2'-fluoroadenosine-3'-phosphate
  modified_base 8: mod_base = OTHER; note = 2'-O-methyladenosine-3'-phosphate
  modified_base 9: mod_base = OTHER; note = 2'-deoxy-2'-fluorocytidine-3'-phosphate
  modified_base 10: mod_base = OTHER; note = 2'-deoxy-2'-fluorouridine-3'-phosphate
  modified_base 11: mod_base = OTHER; note = 2'-deoxy-2'-fluorocytidine-3'-phosphate
  modified_base 12: mod_base = OTHER; note = 2'-O-methyladenosine-3'-phosphate
  modified_base 13: mod_base = OTHER; note = 2'-O-methyladenosine-3'-phosphate
  modified_base 14: mod_base = OTHER; note = 2'-O-methyluridine-3'-phosphate
  modified_base 15: mod_base = OTHER; note = 2'-O-methyladenosine-3'-phosphate
  modified_base 16: mod_base = OTHER; note = 2'-O-methyladenosine-3'-phosphate
  modified_base 17: mod_base = OTHER; note = 2'-O-methyladenosine-3'-phosphate
  modified_base 18: mod_base = OTHER; note = 2'-O-methylguanosine-3'-phosphate
  modified_base 19: mod_base = OTHER; note = 2'-O-methyluridine-3'-phosphate
  modified_base 20: mod_base = OTHER; note = 2'-O-methylguanosine-3'-phosphate
  modified_base 21: mod_base = OTHER; note = 2'-O-methyladenosine-3'-phosphate ((2S,4R)-1-[29-[[2-(acetylamino)-2-deoxy-beta-D-galactopyra nosyl]oxy]-14,14-bis[[3-[[3-[[5-[[2-(acetylamino)-2-deoxy-b eta-D-galactopyranosyl]oxy]-1-oxopentyl]amino]propyl]amino] -3-oxopropoxy]methyl]-1,12,19,25-tetraoxo-16-oxa-13,20,24-t riazanonacos-1-yl]-4-hydroxy-2-pyrrolidinyl)methyl ester
cacagaaactcaataaagtga

SEQ ID NO: 225 - RNA, 23 nt, synthetic construct
  source 1..23: mol_type = other RNA
  modified_base 1: mod_base = OTHER; note = 2'-O-methyluridine-3'-phosphorothioate 5'-(3,3,5S-trimethyl-1,2-dithiolan-4S-yl thiophosphate)
  modified_base 2: mod_base = OTHER; note = 2'-deoxy-2'-fluorocytidine-3'-phosphorothioate
  modified_base 3: mod_base = OTHER; note = 2'-O-methyladenosine-3'-phosphate
  modified_base 4: mod_base = OTHER; note = 2'-O-methylcytidine-3'-phosphate
  modified_base 5: mod_base = OTHER; note = 2'-O-methyluridine-3'-phosphate
  modified_base 6: mod_base = OTHER; note = 2'-deoxy-2'-fluorouridine-3'-phosphate
  modified_base 7: mod_base = OTHER; note = 2'-O-methyluridine-3'-phosphate
  modified_base 8: mod_base = OTHER; note = 2'-deoxy-2'-fluoroadenosine-3'-phosphate
  modified_base 9: mod_base = OTHER; note = 2'-deoxy-2'-fluorouridine-3'-phosphate
  modified_base 10: mod_base = OTHER; note = 2'-O-methyluridine-3'-phosphate
  modified_base 11: mod_base = OTHER; note = 2'-O-methylguanosine-3'-phosphate
  modified_base 12: mod_base = OTHER; note = 2'-O-methyladenosine-3'-phosphate
  modified_base 13: mod_base = OTHER; note = 2'-O-methylguanosine-3'-phosphate
  modified_base 14: mod_base = OTHER; note = 2'-deoxy-2'-fluorouridine-3'-phosphate
  modified_base 15: mod_base = OTHER; note = 2'-O-methyluridine-3'-phosphate
  modified_base 16: mod_base = OTHER; note = 2'-deoxy-2'-fluorouridine-3'-phosphate
  modified_base 17: mod_base = OTHER; note = 2'-O-methylcytidine-3'-phosphate
  modified_base 18: mod_base = OTHER; note = 2'-O-methyluridine-3'-phosphate
  modified_base 19: mod_base = OTHER; note = 2'-O-methylguanosine-3'-phosphate
  modified_base 20: mod_base = OTHER; note = 2'-O-methyluridine-3'-phosphate
  modified_base 21: mod_base = OTHER; note = 2'-O-methylguanosine-3'-phosphorothioate
  modified_base 22: mod_base = OTHER; note = 2'-O-methylcytidine-3'-phosphorothioate
  modified_base 23: mod_base = OTHER; note = 2'-O-methylcytidine
tcactttattgagtttctgtgcc

SEQ ID NO: 226 - RNA, 21 nt, synthetic construct
  source 1..21: mol_type = other RNA
  modified_base 1: mod_base = OTHER; note = 2'-O-methylcytidine-3'-phosphorothioate
  modified_base 2: mod_base = OTHER; note = 2'-O-methyladenosine-3'-phosphorothioate
  modified_base 3: mod_base = OTHER; note = 2'-O-methylcytidine-3'-phosphate
  modified_base 4: mod_base = OTHER; note = 2'-O-methyladenosine-3'-phosphate
  modified_base 5: mod_base = OTHER; note = 2'-O-methylguanosine-3'-phosphate
  modified_base 6: mod_base = OTHER; note = 2'-O-methyladenosine-3'-phosphate
  modified_base 7: mod_base = OTHER; note = 2'-deoxy-2'-fluoroadenosine-3'-phosphate
  modified_base 8: mod_base = OTHER; note = 2'-O-methyladenosine-3'-phosphate
  modified_base 9: mod_base = OTHER; note = 2'-deoxy-2'-fluorocytidine-3'-phosphate
  modified_base 10: mod_base = OTHER; note = 2'-deoxy-2'-fluorouridine-3'-phosphate
  modified_base 11: mod_base = OTHER; note = 2'-deoxy-2'-fluorocytidine-3'-phosphate
  modified_base 12: mod_base = OTHER; note = 2'-O-methyladenosine-3'-phosphate
  modified_base 13: mod_base = OTHER; note = 2'-O-methyladenosine-3'-phosphate
  modified_base 14: mod_base = OTHER; note = 2'-O-methyluridine-3'-phosphate
  modified_base 15: mod_base = OTHER; note = 2'-O-methyladenosine-3'-phosphate
  modified_base 16: mod_base = OTHER; note = 2'-O-methyladenosine-3'-phosphate
  modified_base 17: mod_base = OTHER; note = 2'-O-methyladenosine-3'-phosphate
  modified_base 18: mod_base = OTHER; note = 2'-O-methylguanosine-3'-phosphate
  modified_base 19: mod_base = OTHER; note = 2'-O-methyluridine-3'-phosphate
  modified_base 20: mod_base = OTHER; note = 2'-O-methylguanosine-3'-phosphate
  modified_base 21: mod_base = OTHER; note = 2'-O-methyladenosine-3'-phosphate ((2S,4R)-1-[29-[[2-(acetylamino)-2-deoxy-beta-D-galactopyra nosyl]oxy]-14,14-bis[[3-[[3-[[5-[[2-(acetylamino)-2-deoxy-b eta-D-galactopyranosyl]oxy]-1-oxopentyl]amino]propyl]amino] -3-oxopropoxy]methyl]-1,12,19,25-tetraoxo-16-oxa-13,20,24-t riazanonacos-1-yl]-4-hydroxy-2-pyrrolidinyl)methyl ester
cacagaaactcaataaagtga

SEQ ID NO: 227 - RNA, 23 nt, synthetic construct
  source 1..23: mol_type = other RNA
  modified_base 1: mod_base = OTHER; note = 2'-O-methyluridine-3'-phosphorothioate 5'-(cis-5-phenyl-3,3-dimethyl-1,2-dithiolan-4-yl thiophosphate)
  modified_base 2: mod_base = OTHER; note = 2'-deoxy-2'-fluorocytidine-3'-phosphorothioate
  modified_base 3: mod_base = OTHER; note = 2'-O-methyladenosine-3'-phosphate
  modified_base 4: mod_base = OTHER; note = 2'-O-methylcytidine-3'-phosphate
  modified_base 5: mod_base = OTHER; note = 2'-O-methyluridine-3'-phosphate
  modified_base 6: mod_base = OTHER; note = 2'-deoxy-2'-fluorouridine-3'-phosphate
  modified_base 7: mod_base = OTHER; note = 2'-O-methyluridine-3'-phosphate
  modified_base 8: mod_base = OTHER; note = 2'-deoxy-2'-fluoroadenosine-3'-phosphate
  modified_base 9: mod_base = OTHER; note = 2'-deoxy-2'-fluorouridine-3'-phosphate
  modified_base 10: mod_base = OTHER; note = 2'-O-methyluridine-3'-phosphate
  modified_base 11: mod_base = OTHER; note = 2'-O-methylguanosine-3'-phosphate
  modified_base 12: mod_base = OTHER; note = 2'-O-methyladenosine-3'-phosphate
  modified_base 13: mod_base = OTHER; note = 2'-O-methylguanosine-3'-phosphate
  modified_base 14: mod_base = OTHER; note = 2'-deoxy-2'-fluorouridine-3'-phosphate
  modified_base 15: mod_base = OTHER; note = 2'-O-methyluridine-3'-phosphate
  modified_base 16: mod_base = OTHER; note = 2'-deoxy-2'-fluorouridine-3'-phosphate
  modified_base 17: mod_base = OTHER; note = 2'-O-methylcytidine-3'-phosphate
  modified_base 18: mod_base = OTHER; note = 2'-O-methyluridine-3'-phosphate
  modified_base 19: mod_base = OTHER; note = 2'-O-methylguanosine-3'-phosphate
  modified_base 20: mod_base = OTHER; note = 2'-O-methyluridine-3'-phosphate
  modified_base 21: mod_base = OTHER; note = 2'-O-methylguanosine-3'-phosphorothioate
  modified_base 22: mod_base = OTHER; note = 2'-O-methylcytidine-3'-phosphorothioate
  modified_base 23: mod_base = OTHER; note = 2'-O-methylcytidine
tcactttattgagtttctgtgcc

SEQ ID NO: 228 - RNA, 21 nt, synthetic construct
  source 1..21: mol_type = other RNA
  modified_base 1: mod_base = OTHER; note = 2'-O-methylcytidine-3'-phosphorothioate
  modified_base 2: mod_base = OTHER; note = 2'-O-methyladenosine-3'-phosphorothioate
  modified_base 3: mod_base = OTHER; note = 2'-O-methylcytidine-3'-phosphate
  modified_base 4: mod_base = OTHER; note = 2'-O-methyladenosine-3'-phosphate
  modified_base 5: mod_base = OTHER; note = 2'-O-methylguanosine-3'-phosphate
  modified_base 6: mod_base = OTHER; note = 2'-O-methyladenosine-3'-phosphate
  modified_base 7: mod_base = OTHER; note = 2'-deoxy-2'-fluoroadenosine-3'-phosphate
  modified_base 8: mod_base = OTHER; note = 2'-O-methyladenosine-3'-phosphate
  modified_base 9: mod_base = OTHER; note = 2'-deoxy-2'-fluorocytidine-3'-phosphate
  modified_base 10: mod_base = OTHER; note = 2'-deoxy-2'-fluorouridine-3'-phosphate
  modified_base 11: mod_base = OTHER; note = 2'-deoxy-2'-fluorocytidine-3'-phosphate
  modified_base 12: mod_base = OTHER; note = 2'-O-methyladenosine-3'-phosphate
  modified_base 13: mod_base = OTHER; note = 2'-O-methyladenosine-3'-phosphate
  modified_base 14: mod_base = OTHER; note = 2'-O-methyluridine-3'-phosphate
  modified_base 15: mod_base = OTHER; note = 2'-O-methyladenosine-3'-phosphate
  modified_base 16: mod_base = OTHER; note = 2'-O-methyladenosine-3'-phosphate
  modified_base 17: mod_base = OTHER; note = 2'-O-methyladenosine-3'-phosphate
  modified_base 18: mod_base = OTHER; note = 2'-O-methylguanosine-3'-phosphate
  modified_base 19: mod_base = OTHER; note = 2'-O-methyluridine-3'-phosphate
  modified_base 20: mod_base = OTHER; note = 2'-O-methylguanosine-3'-phosphate
  modified_base 21: mod_base = OTHER; note = 2'-O-methyladenosine-3'-phosphate ((2S,4R)-1-[29-[[2-(acetylamino)-2-deoxy-beta-D-galactopyra nosyl]oxy]-14,14-bis[[3-[[3-[[5-[[2-(acetylamino)-2-deoxy-b eta-D-galactopyranosyl]oxy]-1-oxopentyl]amino]propyl]amino] -3-oxopropoxy]methyl]-1,12,19,25-tetraoxo-16-oxa-13,20,24-t riazanonacos-1-yl]-4-hydroxy-2-pyrrolidinyl)methyl ester
cacagaaactcaataaagtga

SEQ ID NO: 229 - RNA, 23 nt, synthetic construct
  source 1..23: mol_type = other RNA
  modified_base 1: mod_base = OTHER; note = 2'-O-methyluridine-3'-phosphorothioate 5'-(trans-5-phenyl-3,3-dimethyl-1,2-dithiolan-4-yl thiophosphate)
  modified_base 2: mod_base = OTHER; note = 2'-deoxy-2'-fluorocytidine-3'-phosphorothioate
  modified_base 3: mod_base = OTHER; note = 2'-O-methyladenosine-3'-phosphate
  modified_base 4: mod_base = OTHER; note = 2'-O-methylcytidine-3'-phosphate
  modified_base 5: mod_base = OTHER; note = 2'-O-methyluridine-3'-phosphate
  modified_base 6: mod_base = OTHER; note = 2'-deoxy-2'-fluorouridine-3'-phosphate
  modified_base 7: mod_base = OTHER; note = 2'-O-methyluridine-3'-phosphate
  modified_base 8: mod_base = OTHER; note = 2'-deoxy-2'-fluoroadenosine-3'-phosphate
  modified_base 9: mod_base = OTHER; note = 2'-deoxy-2'-fluorouridine-3'-phosphate
  modified_base 10: mod_base = OTHER; note = 2'-O-methyluridine-3'-phosphate
  modified_base 11: mod_base = OTHER; note = 2'-O-methylguanosine-3'-phosphate
  modified_base 12: mod_base = OTHER; note = 2'-O-methyladenosine-3'-phosphate
  modified_base 13: mod_base = OTHER; note = 2'-O-methylguanosine-3'-phosphate
  modified_base 14: mod_base = OTHER; note = 2'-deoxy-2'-fluorouridine-3'-phosphate
  modified_base 15: mod_base = OTHER; note = 2'-O-methyluridine-3'-phosphate
  modified_base 16: mod_base = OTHER; note = 2'-deoxy-2'-fluorouridine-3'-phosphate
  modified_base 17: mod_base = OTHER; note = 2'-O-methylcytidine-3'-phosphate
  modified_base 18: mod_base = OTHER; note = 2'-O-methyluridine-3'-phosphate
  modified_base 19: mod_base = OTHER; note = 2'-O-methylguanosine-3'-phosphate
  modified_base 20: mod_base = OTHER; note = 2'-O-methyluridine-3'-phosphate
  modified_base 21: mod_base = OTHER; note = 2'-O-methylguanosine-3'-phosphorothioate
  modified_base 22: mod_base = OTHER; note = 2'-O-methylcytidine-3'-phosphorothioate
  modified_base 23: mod_base = OTHER; note = 2'-O-methylcytidine
tcactttattgagtttctgtgcc

SEQ ID NO: 230 - RNA, 21 nt, synthetic construct
  source 1..21: mol_type = other RNA
  modified_base 1: mod_base = OTHER; note = 2'-O-methylcytidine-3'-phosphorothioate
  modified_base 2: mod_base = OTHER; note = 2'-O-methyladenosine-3'-phosphorothioate
  modified_base 3: mod_base = OTHER; note = 2'-O-methylcytidine-3'-phosphate
  modified_base 4: mod_base = OTHER; note = 2'-O-methyladenosine-3'-phosphate
  modified_base 5: mod_base = OTHER; note = 2'-O-methylguanosine-3'-phosphate
  modified_base 6: mod_base = OTHER; note = 2'-O-methyladenosine-3'-phosphate
  modified_base 7: mod_base = OTHER; note = 2'-deoxy-2'-fluoroadenosine-3'-phosphate
  modified_base 8: mod_base = OTHER; note = 2'-O-methyladenosine-3'-phosphate
  modified_base 9: mod_base = OTHER; note = 2'-deoxy-2'-fluorocytidine-3'-phosphate
  modified_base 10: mod_base = OTHER; note = 2'-deoxy-2'-fluorouridine-3'-phosphate
  modified_base 11: mod_base = OTHER; note = 2'-deoxy-2'-fluorocytidine-3'-phosphate
  modified_base 12: mod_base = OTHER; note = 2'-O-methyladenosine-3'-phosphate
  modified_base 13: mod_base = OTHER; note = 2'-O-methyladenosine-3'-phosphate
  modified_base 14: mod_base = OTHER; note = 2'-O-methyluridine-3'-phosphate
  modified_base 15: mod_base = OTHER; note = 2'-O-methyladenosine-3'-phosphate
  modified_base 16: mod_base = OTHER; note = 2'-O-methyladenosine-3'-phosphate
  modified_base 17: mod_base = OTHER; note = 2'-O-methyladenosine-3'-phosphate
  modified_base 18: mod_base = OTHER; note = 2'-O-methylguanosine-3'-phosphate
  modified_base 19: mod_base = OTHER; note = 2'-O-methyluridine-3'-phosphate
  modified_base 20: mod_base = OTHER; note = 2'-O-methylguanosine-3'-phosphate
  modified_base 21: mod_base = OTHER; note = 2'-O-methyladenosine-3'-phosphate ((2S,4R)-1-[29-[[2-(acetylamino)-2-deoxy-beta-D-galactopyra nosyl]oxy]-14,14-bis[[3-[[3-[[5-[[2-(acetylamino)-2-deoxy-b eta-D-galactopyranosyl]oxy]-1-oxopentyl]amino]propyl]amino] -3-oxopropoxy]methyl]-1,12,19,25-tetraoxo-16-oxa-13,20,24-t riazanonacos-1-yl]-4-hydroxy-2-pyrrolidinyl)methyl ester
cacagaaactcaataaagtga

SEQ ID NO: 231 - RNA, 23 nt, synthetic construct
  source 1..23: mol_type = other RNA
  modified_base 1: mod_base = OTHER; note = 2'-O-methyluridine-3'-phosphorothioate 5'-(cis-5-(4-methylphenyl)-3,3-dimethyl-1,2-dithiolan-4-yl thiophosphate)
  modified_base 2: mod_base = OTHER; note = 2'-deoxy-2'-fluorocytidine-3'-phosphorothioate
  modified_base 3: mod_base = OTHER; note = 2'-O-methyladenosine-3'-phosphate
  modified_base 4: mod_base = OTHER; note = 2'-O-methylcytidine-3'-phosphate
  modified_base 5: mod_base = OTHER; note = 2'-O-methyluridine-3'-phosphate
  modified_base 6: mod_base = OTHER; note = 2'-deoxy-2'-fluorouridine-3'-phosphate
  modified_base 7: mod_base = OTHER; note = 2'-O-methyluridine-3'-phosphate
  modified_base 8: mod_base = OTHER; note = 2'-deoxy-2'-fluoroadenosine-3'-phosphate
  modified_base 9: mod_base = OTHER; note = 2'-deoxy-2'-fluorouridine-3'-phosphate
  modified_base 10: mod_base = OTHER; note = 2'-O-methyluridine-3'-phosphate
  modified_base 11: mod_base = OTHER; note = 2'-O-methylguanosine-3'-phosphate
  modified_base 12: mod_base = OTHER; note = 2'-O-methyladenosine-3'-phosphate
  modified_base 13: mod_base = OTHER; note = 2'-O-methylguanosine-3'-phosphate
  modified_base 14: mod_base = OTHER; note = 2'-deoxy-2'-fluorouridine-3'-phosphate
  modified_base 15: mod_base = OTHER; note = 2'-O-methyluridine-3'-phosphate
  modified_base 16: mod_base = OTHER; note = 2'-deoxy-2'-fluorouridine-3'-phosphate
  modified_base 17: mod_base = OTHER; note = 2'-O-methylcytidine-3'-phosphate
  modified_base 18: mod_base = OTHER; note = 2'-O-methyluridine-3'-phosphate
  modified_base 19: mod_base = OTHER; note = 2'-O-methylguanosine-3'-phosphate
  modified_base 20: mod_base = OTHER; note = 2'-O-methyluridine-3'-phosphate
  modified_base 21: mod_base = OTHER; note = 2'-O-methylguanosine-3'-phosphorothioate
  modified_base 22: mod_base = OTHER; note = 2'-O-methylcytidine-3'-phosphorothioate
  modified_base 23: mod_base = OTHER; note = 2'-O-methylcytidine
tcactttattgagtttctgtgcc

SEQ ID NO: 232 - RNA, 21 nt, synthetic construct
  source 1..21: mol_type = other RNA
  modified_base 1: mod_base = OTHER; note = 2'-O-methylcytidine-3'-phosphorothioate
  modified_base 2: mod_base = OTHER; note = 2'-O-methyladenosine-3'-phosphorothioate
  modified_base 3: mod_base = OTHER; note = 2'-O-methylcytidine-3'-phosphate
  modified_base 4: mod_base = OTHER; note = 2'-O-methyladenosine-3'-phosphate
  modified_base 5: mod_base = OTHER; note = 2'-O-methylguanosine-3'-phosphate
  modified_base 6: mod_base = OTHER; note = 2'-O-methyladenosine-3'-phosphate
  modified_base 7: mod_base = OTHER; note = 2'-deoxy-2'-fluoroadenosine-3'-phosphate
  modified_base 8: mod_base = OTHER; note = 2'-O-methyladenosine-3'-phosphate
  modified_base 9: mod_base = OTHER; note = 2'-deoxy-2'-fluorocytidine-3'-phosphate
  modified_base 10: mod_base = OTHER; note = 2'-deoxy-2'-fluorouridine-3'-phosphate
  modified_base 11: mod_base = OTHER; note = 2'-deoxy-2'-fluorocytidine-3'-phosphate
  modified_base 12: mod_base = OTHER; note = 2'-O-methyladenosine-3'-phosphate
  modified_base 13: mod_base = OTHER; note = 2'-O-methyladenosine-3'-phosphate
  modified_base 14: mod_base = OTHER; note = 2'-O-methyluridine-3'-phosphate
  modified_base 15: mod_base = OTHER; note = 2'-O-methyladenosine-3'-phosphate
  modified_base 16: mod_base = OTHER; note = 2'-O-methyladenosine-3'-phosphate
  modified_base 17: mod_base = OTHER; note = 2'-O-methyladenosine-3'-phosphate
  modified_base 18: mod_base = OTHER; note = 2'-O-methylguanosine-3'-phosphate
  modified_base 19: mod_base = OTHER; note = 2'-O-methyluridine-3'-phosphate
  modified_base 20: mod_base = OTHER; note = 2'-O-methylguanosine-3'-phosphate
  modified_base 21: mod_base = OTHER; note = 2'-O-methyladenosine-3'-phosphate ((2S,4R)-1-[29-[[2-(acetylamino)-2-deoxy-beta-D-galactopyra nosyl]oxy]-14,14-bis[[3-[[3-[[5-[[2-(acetylamino)-2-deoxy-b eta-D-galactopyranosyl]oxy]-1-oxopentyl]amino]propyl]amino] -3-oxopropoxy]methyl]-1,12,19,25-tetraoxo-16-oxa-13,20,24-t riazanonacos-1-yl]-4-hydroxy-2-pyrrolidinyl)methyl ester
cacagaaactcaataaagtga

SEQ ID NO: 233 - RNA, 23 nt, synthetic construct
  source 1..23: mol_type = other RNA
  modified_base 1: mod_base = OTHER; note = 2'-O-methyluridine-3'-phosphorothioate 5'-(trans-5-(4-methylphenyl)-3,3-dimethyl-1,2-dithiolan-4-y l thiophosphate)
  modified_base 2: mod_base = OTHER; note = 2'-deoxy-2'-fluorocytidine-3'-phosphorothioate
  modified_base 3: mod_base = OTHER; note = 2'-O-methyladenosine-3'-phosphate
  modified_base 4: mod_base = OTHER; note = 2'-O-methylcytidine-3'-phosphate
  modified_base 5: mod_base = OTHER; note = 2'-O-methyluridine-3'-phosphate
  modified_base 6: mod_base = OTHER; note = 2'-deoxy-2'-fluorouridine-3'-phosphate
  modified_base 7: mod_base = OTHER; note = 2'-O-methyluridine-3'-phosphate
  modified_base 8: mod_base = OTHER; note = 2'-deoxy-2'-fluoroadenosine-3'-phosphate
  modified_base 9: mod_base = OTHER; note = 2'-deoxy-2'-fluorouridine-3'-phosphate
  modified_base 10: mod_base = OTHER; note = 2'-O-methyluridine-3'-phosphate
  modified_base 11: mod_base = OTHER; note = 2'-O-methylguanosine-3'-phosphate
  modified_base 12: mod_base = OTHER; note = 2'-O-methyladenosine-3'-phosphate
  modified_base 13: mod_base = OTHER; note = 2'-O-methylguanosine-3'-phosphate
  modified_base 14: mod_base = OTHER; note = 2'-deoxy-2'-fluorouridine-3'-phosphate
  modified_base 15: mod_base = OTHER; note = 2'-O-methyluridine-3'-phosphate
  modified_base 16: mod_base = OTHER; note = 2'-deoxy-2'-fluorouridine-3'-phosphate
  modified_base 17: mod_base = OTHER; note = 2'-O-methylcytidine-3'-phosphate
  modified_base 18: mod_base = OTHER; note = 2'-O-methyluridine-3'-phosphate
  modified_base 19: mod_base = OTHER; note = 2'-O-methylguanosine-3'-phosphate
  modified_base 20: mod_base = OTHER; note = 2'-O-methyluridine-3'-phosphate
  modified_base 21: mod_base = OTHER; note = 2'-O-methylguanosine-3'-phosphorothioate
  modified_base 22: mod_base = OTHER; note = 2'-O-methylcytidine-3'-phosphorothioate
  modified_base 23: mod_base = OTHER; note = 2'-O-methylcytidine
tcactttattgagtttctgtgcc

SEQ ID NO: 234 - RNA, 21 nt, synthetic construct
  source 1..21: mol_type = other RNA
  modified_base 1: mod_base = OTHER; note = 2'-O-methylcytidine-3'-phosphorothioate
  modified_base 2: mod_base = OTHER; note = 2'-O-methyladenosine-3'-phosphorothioate
  modified_base 3: mod_base = OTHER; note = 2'-O-methylcytidine-3'-phosphate
  modified_base 4: mod_base = OTHER; note = 2'-O-methyladenosine-3'-phosphate
  modified_base 5: mod_base = OTHER; note = 2'-O-methylguanosine-3'-phosphate
  modified_base 6: mod_base = OTHER; note = 2'-O-methyladenosine-3'-phosphate
  modified_base 7: mod_base = OTHER; note = 2'-deoxy-2'-fluoroadenosine-3'-phosphate
  modified_base 8: mod_base = OTHER; note = 2'-O-methyladenosine-3'-phosphate
  modified_base 9: mod_base = OTHER; note = 2'-deoxy-2'-fluorocytidine-3'-phosphate
  modified_base 10: mod_base = OTHER; note = 2'-deoxy-2'-fluorouridine-3'-phosphate
  modified_base 11: mod_base = OTHER; note = 2'-deoxy-2'-fluorocytidine-3'-phosphate
  modified_base 12: mod_base = OTHER; note = 2'-O-methyladenosine-3'-phosphate
  modified_base 13: mod_base = OTHER; note = 2'-O-methyladenosine-3'-phosphate
  modified_base 14: mod_base = OTHER; note = 2'-O-methyluridine-3'-phosphate
  modified_base 15: mod_base = OTHER; note = 2'-O-methyladenosine-3'-phosphate
  modified_base 16: mod_base = OTHER; note = 2'-O-methyladenosine-3'-phosphate
  modified_base 17: mod_base = OTHER; note = 2'-O-methyladenosine-3'-phosphate
  modified_base 18: mod_base = OTHER; note = 2'-O-methylguanosine-3'-phosphate
  modified_base 19: mod_base = OTHER; note = 2'-O-methyluridine-3'-phosphate
  modified_base 20: mod_base = OTHER; note = 2'-O-methylguanosine-3'-phosphate
  modified_base 21: mod_base = OTHER; note = 2'-O-methyladenosine-3'-phosphate ((2S,4R)-1-[29-[[2-(acetylamino)-2-deoxy-beta-D-galactopyra nosyl]oxy]-14,14-bis[[3-[[3-[[5-[[2-(acetylamino)-2-deoxy-b eta-D-galactopyranosyl]oxy]-1-oxopentyl]amino]propyl]amino] -3-oxopropoxy]methyl]-1,12,19,25-tetraoxo-16-oxa-13,20,24-t riazanonacos-1-yl]-4-hydroxy-2-pyrrolidinyl)methyl ester
cacagaaactcaataaagtga

SEQ ID NO: 235 - RNA, 23 nt, synthetic construct
  source 1..23: mol_type = other RNA
  modified_base 1: mod_base = OTHER; note = 2'-O-methyluridine-3'-phosphorothioate 5'-(cis-5-(4-methoxyphenyl)-3,3-dimethyl-1,2-dithiolan-4-yl thiophosphate)
  modified_base 2: mod_base = OTHER; note = 2'-deoxy-2'-fluorocytidine-3'-phosphorothioate
  modified_base 3: mod_base = OTHER; note = 2'-O-methyladenosine-3'-phosphate
  modified_base 4: mod_base = OTHER; note = 2'-O-methylcytidine-3'-phosphate
  modified_base 5: mod_base = OTHER; note = 2'-O-methyluridine-3'-phosphate
  modified_base 6: mod_base = OTHER; note = 2'-deoxy-2'-fluorouridine-3'-phosphate
  modified_base 7: mod_base = OTHER; note = 2'-O-methyluridine-3'-phosphate
  modified_base 8: mod_base = OTHER; note = 2'-deoxy-2'-fluoroadenosine-3'-phosphate
  modified_base 9: mod_base = OTHER; note = 2'-deoxy-2'-fluorouridine-3'-phosphate
  modified_base 10: mod_base = OTHER; note = 2'-O-methyluridine-3'-phosphate
  modified_base 11: mod_base = OTHER; note = 2'-O-methylguanosine-3'-phosphate
  modified_base 12: mod_base = OTHER; note = 2'-O-methyladenosine-3'-phosphate
  modified_base 13: mod_base = OTHER; note = 2'-O-methylguanosine-3'-phosphate
  modified_base 14: mod_base = OTHER; note = 2'-deoxy-2'-fluorouridine-3'-phosphate
  modified_base 15: mod_base = OTHER; note = 2'-O-methyluridine-3'-phosphate
  modified_base 16: mod_base = OTHER; note = 2'-deoxy-2'-fluorouridine-3'-phosphate
  modified_base 17: mod_base = OTHER; note = 2'-O-methylcytidine-3'-phosphate
  modified_base 18: mod_base = OTHER; note = 2'-O-methyluridine-3'-phosphate
  modified_base 19: mod_base = OTHER; note = 2'-O-methylguanosine-3'-phosphate
  modified_base 20: mod_base = OTHER; note = 2'-O-methyluridine-3'-phosphate
  modified_base 21: mod_base = OTHER; note = 2'-O-methylguanosine-3'-phosphorothioate
  modified_base 22: mod_base = OTHER; note = 2'-O-methylcytidine-3'-phosphorothioate
  modified_base 23: mod_base = OTHER; note = 2'-O-methylcytidine
tcactttattgagtttctgtgcc

SEQ ID NO: 236 - RNA, 21 nt, synthetic construct
  source 1..21: mol_type = other RNA
  modified_base 1: mod_base = OTHER; note = 2'-O-methylcytidine-3'-phosphorothioate
  modified_base 2: mod_base = OTHER; note = 2'-O-methyladenosine-3'-phosphorothioate
  modified_base 3: mod_base = OTHER; note = 2'-O-methylcytidine-3'-phosphate
  modified_base 4: mod_base = OTHER; note = 2'-O-methyladenosine-3'-phosphate
  modified_base 5: mod_base = OTHER; note = 2'-O-methylguanosine-3'-phosphate
  modified_base 6: mod_base = OTHER; note = 2'-O-methyladenosine-3'-phosphate
  modified_base 7: mod_base = OTHER; note = 2'-deoxy-2'-fluoroadenosine-3'-phosphate
  modified_base 8: mod_base = OTHER; note = 2'-O-methyladenosine-3'-phosphate
  modified_base 9: mod_base = OTHER; note = 2'-deoxy-2'-fluorocytidine-3'-phosphate
  modified_base 10: mod_base = OTHER; note = 2'-deoxy-2'-fluorouridine-3'-phosphate
  modified_base 11: mod_base = OTHER; note = 2'-deoxy-2'-fluorocytidine-3'-phosphate
  modified_base 12: mod_base = OTHER; note = 2'-O-methyladenosine-3'-phosphate
  modified_base 13: mod_base = OTHER; note = 2'-O-methyladenosine-3'-phosphate
  modified_base 14: mod_base = OTHER; note = 2'-O-methyluridine-3'-phosphate
  modified_base 15: mod_base = OTHER; note = 2'-O-methyladenosine-3'-phosphate
  modified_base 16: mod_base = OTHER; note = 2'-O-methyladenosine-3'-phosphate
  modified_base 17: mod_base = OTHER; note = 2'-O-methyladenosine-3'-phosphate
  modified_base 18: mod_base = OTHER; note = 2'-O-methylguanosine-3'-phosphate
  modified_base 19: mod_base = OTHER; note = 2'-O-methyluridine-3'-phosphate
  modified_base 20: mod_base = OTHER; note = 2'-O-methylguanosine-3'-phosphate
  modified_base 21: mod_base = OTHER; note = 2'-O-methyladenosine-3'-phosphate ((2S,4R)-1-[29-[[2-(acetylamino)-2-deoxy-beta-D-galactopyra nosyl]oxy]-14,14-bis[[3-[[3-[[5-[[2-(acetylamino)-2-deoxy-b eta-D-galactopyranosyl]oxy]-1-oxopentyl]amino]propyl]amino] -3-oxopropoxy]methyl]-1,12,19,25-tetraoxo-16-oxa-13,20,24-t riazanonacos-1-yl]-4-hydroxy-2-pyrrolidinyl)methyl ester
cacagaaactcaataaagtga

SEQ ID NO: 237 - RNA, 23 nt, synthetic construct
  source 1..23: mol_type = other RNA
  modified_base 1: mod_base = OTHER; note = 2'-O-methyluridine-3'-phosphorothioate 5'-(trans-5-(4-methoxyphenyl)-3,3-dimethyl-1,2-dithiolan-4- yl thiophosphate)
  modified_base 2: mod_base = OTHER; note = 2'-deoxy-2'-fluorocytidine-3'-phosphorothioate
  modified_base 3: mod_base = OTHER; note = 2'-O-methyladenosine-3'-phosphate
  modified_base 4: mod_base = OTHER; note = 2'-O-methylcytidine-3'-phosphate
  modified_base 5: mod_base = OTHER; note = 2'-O-methyluridine-3'-phosphate
  modified_base 6: mod_base = OTHER; note = 2'-deoxy-2'-fluorouridine-3'-phosphate
  modified_base 7: mod_base = OTHER; note = 2'-O-methyluridine-3'-phosphate
  modified_base 8: mod_base = OTHER; note = 2'-deoxy-2'-fluoroadenosine-3'-phosphate
  modified_base 9: mod_base = OTHER; note = 2'-deoxy-2'-fluorouridine-3'-phosphate
  modified_base 10: mod_base = OTHER; note = 2'-O-methyluridine-3'-phosphate
  modified_base 11: mod_base = OTHER; note = 2'-O-methylguanosine-3'-phosphate
  modified_base 12: mod_base = OTHER; note = 2'-O-methyladenosine-3'-phosphate
  modified_base 13: mod_base = OTHER; note = 2'-O-methylguanosine-3'-phosphate
  modified_base 14: mod_base = OTHER; note = 2'-deoxy-2'-fluorouridine-3'-phosphate
  modified_base 15: mod_base = OTHER; note = 2'-O-methyluridine-3'-phosphate
  modified_base 16: mod_base = OTHER; note = 2'-deoxy-2'-fluorouridine-3'-phosphate
  modified_base 17: mod_base = OTHER; note = 2'-O-methylcytidine-3'-phosphate
  modified_base 18: mod_base = OTHER; note = 2'-O-methyluridine-3'-phosphate
  modified_base 19: mod_base = OTHER; note = 2'-O-methylguanosine-3'-phosphate
  modified_base 20: mod_base = OTHER; note = 2'-O-methyluridine-3'-phosphate
  modified_base 21: mod_base = OTHER; note = 2'-O-methylguanosine-3'-phosphorothioate
  modified_base 22: mod_base = OTHER; note = 2'-O-methylcytidine-3'-phosphorothioate
  modified_base 23: mod_base = OTHER; note = 2'-O-methylcytidine
tcactttattgagtttctgtgcc

SEQ ID NO: 238 - RNA, 21 nt, synthetic construct
  source 1..21: mol_type = other RNA
  modified_base 1: mod_base = OTHER; note = 2'-O-methylcytidine-3'-phosphorothioate
  modified_base 2: mod_base = OTHER; note = 2'-O-methyladenosine-3'-phosphorothioate
  modified_base 3: mod_base = OTHER; note = 2'-O-methylcytidine-3'-phosphate
  modified_base 4: mod_base = OTHER; note = 2'-O-methyladenosine-3'-phosphate
  modified_base 5: mod_base = OTHER; note = 2'-O-methylguanosine-3'-phosphate
  modified_base 6: mod_base = OTHER; note = 2'-O-methyladenosine-3'-phosphate
  modified_base 7: mod_base = OTHER; note = 2'-deoxy-2'-fluoroadenosine-3'-phosphate
  modified_base 8: mod_base = OTHER; note = 2'-O-methyladenosine-3'-phosphate
  modified_base 9: mod_base = OTHER; note = 2'-deoxy-2'-fluorocytidine-3'-phosphate
  modified_base 10: mod_base = OTHER; note = 2'-deoxy-2'-fluorouridine-3'-phosphate
  modified_base 11: mod_base = OTHER; note = 2'-deoxy-2'-fluorocytidine-3'-phosphate
  modified_base 12: mod_base = OTHER; note = 2'-O-methyladenosine-3'-phosphate
  modified_base 13: mod_base = OTHER; note = 2'-O-methyladenosine-3'-phosphate
  modified_base 14: mod_base = OTHER; note = 2'-O-methyluridine-3'-phosphate
  modified_base 15: mod_base = OTHER; note = 2'-O-methyladenosine-3'-phosphate
  modified_base 16: mod_base = OTHER; note = 2'-O-methyladenosine-3'-phosphate
  modified_base 17: mod_base = OTHER; note = 2'-O-methyladenosine-3'-phosphate
  modified_base 18: mod_base = OTHER; note = 2'-O-methylguanosine-3'-phosphate
  modified_base 19: mod_base = OTHER; note = 2'-O-methyluridine-3'-phosphate
  modified_base 20: mod_base = OTHER; note = 2'-O-methylguanosine-3'-phosphate
  modified_base 21: mod_base = OTHER; note = 2'-O-methyladenosine-3'-phosphate ((2S,4R)-1-[29-[[2-(acetylamino)-2-deoxy-beta-D-galactopyra nosyl]oxy]-14,14-bis[[3-[[3-[[5-[[2-(acetylamino)-2-deoxy-b eta-D-galactopyranosyl]oxy]-1-oxopentyl]amino]propyl]amino] -3-oxopropoxy]methyl]-1,12,19,25-tetraoxo-16-oxa-13,20,24-t riazanonacos-1-yl]-4-hydroxy-2-pyrrolidinyl)methyl ester
cacagaaactcaataaagtga

SEQ ID NO: 239 - RNA, 23 nt, synthetic construct
  source 1..23: mol_type = other RNA
  modified_base 1: mod_base = OTHER; note = 2'-O-methyluridine-3'-phosphorothioate 5'-(cis-5-(4-bromophenyl)-3,3-dimethyl-1,2-dithiolan-4-yl thiophosphate)
  modified_base 2: mod_base = OTHER; note = 2'-deoxy-2'-fluorocytidine-3'-phosphorothioate
  modified_base 3: mod_base = OTHER; note = 2'-O-methyladenosine-3'-phosphate
  modified_base 4: mod_base = OTHER; note = 2'-O-methylcytidine-3'-phosphate
  modified_base 5: mod_base = OTHER; note = 2'-O-methyluridine-3'-phosphate
  modified_base 6: mod_base = OTHER; note = 2'-deoxy-2'-fluorouridine-3'-phosphate
  modified_base 7: mod_base = OTHER; note = 2'-O-methyluridine-3'-phosphate
  modified_base 8: mod_base = OTHER; note = 2'-deoxy-2'-fluoroadenosine-3'-phosphate
  modified_base 9: mod_base = OTHER; note = 2'-deoxy-2'-fluorouridine-3'-phosphate
  modified_base 10: mod_base = OTHER; note = 2'-O-methyluridine-3'-phosphate
  modified_base 11: mod_base = OTHER; note = 2'-O-methylguanosine-3'-phosphate
  modified_base 12: mod_base = OTHER; note = 2'-O-methyladenosine-3'-phosphate
  modified_base 13: mod_base = OTHER; note = 2'-O-methylguanosine-3'-phosphate
  modified_base 14: mod_base = OTHER; note = 2'-deoxy-2'-fluorouridine-3'-phosphate
  modified_base 15: mod_base = OTHER; note = 2'-O-methyluridine-3'-phosphate
  modified_base 16: mod_base = OTHER; note = 2'-deoxy-2'-fluorouridine-3'-phosphate
  modified_base 17: mod_base = OTHER; note = 2'-O-methylcytidine-3'-phosphate
  modified_base 18: mod_base = OTHER; note = 2'-O-methyluridine-3'-phosphate
  modified_base 19: mod_base = OTHER; note = 2'-O-methylguanosine-3'-phosphate
  modified_base 20: mod_base = OTHER; note = 2'-O-methyluridine-3'-phosphate
  modified_base 21: mod_base = OTHER; note = 2'-O-methylguanosine-3'-phosphorothioate
  modified_base 22: mod_base = OTHER; note = 2'-O-methylcytidine-3'-phosphorothioate
  modified_base 23: mod_base = OTHER; note = 2'-O-methylcytidine
tcactttattgagtttctgtgcc

SEQ ID NO: 240 - RNA, 21 nt, synthetic construct
  source 1..21: mol_type = other RNA
  modified_base 1: mod_base = OTHER; note = 2'-O-methylcytidine-3'-phosphorothioate
  modified_base 2: mod_base = OTHER; note = 2'-O-methyladenosine-3'-phosphorothioate
  modified_base 3: mod_base = OTHER; note = 2'-O-methylcytidine-3'-phosphate
  modified_base 4: mod_base = OTHER; note = 2'-O-methyladenosine-3'-phosphate
  modified_base 5: mod_base = OTHER; note = 2'-O-methylguanosine-3'-phosphate
  modified_base 6: mod_base = OTHER; note = 2'-O-methyladenosine-3'-phosphate
  modified_base 7: mod_base = OTHER; note = 2'-deoxy-2'-fluoroadenosine-3'-phosphate
  modified_base 8: mod_base = OTHER; note = 2'-O-methyladenosine-3'-phosphate
  modified_base 9: mod_base = OTHER; note = 2'-deoxy-2'-fluorocytidine-3'-phosphate
  modified_base 10: mod_base = OTHER; note = 2'-deoxy-2'-fluorouridine-3'-phosphate
  modified_base 11: mod_base = OTHER; note = 2'-deoxy-2'-fluorocytidine-3'-phosphate
  modified_base 12: mod_base = OTHER; note = 2'-O-methyladenosine-3'-phosphate
  modified_base 13: mod_base = OTHER; note = 2'-O-methyladenosine-3'-phosphate
  modified_base 14: mod_base = OTHER; note = 2'-O-methyluridine-3'-phosphate
  modified_base 15: mod_base = OTHER; note = 2'-O-methyladenosine-3'-phosphate
  modified_base 16: mod_base = OTHER; note = 2'-O-methyladenosine-3'-phosphate
  modified_base 17: mod_base = OTHER; note = 2'-O-methyladenosine-3'-phosphate
  modified_base 18: mod_base = OTHER; note = 2'-O-methylguanosine-3'-phosphate
  modified_base 19: mod_base = OTHER; note = 2'-O-methyluridine-3'-phosphate
  modified_base 20: mod_base = OTHER; note = 2'-O-methylguanosine-3'-phosphate
  modified_base 21: mod_base = OTHER; note = 2'-O-methyladenosine-3'-phosphate ((2S,4R)-1-[29-[[2-(acetylamino)-2-deoxy-beta-D-galactopyra nosyl]oxy]-14,14-bis[[3-[[3-[[5-[[2-(acetylamino)-2-deoxy-b eta-D-galactopyranosyl]oxy]-1-oxopentyl]amino]propyl]amino] -3-oxopropoxy]methyl]-1,12,19,25-tetraoxo-16-oxa-13,20,24-t riazanonacos-1-yl]-4-hydroxy-2-pyrrolidinyl)methyl ester
cacagaaactcaataaagtga

SEQ ID NO: 241 - RNA, 23 nt, synthetic construct
  source 1..23: mol_type = other RNA
  modified_base 1: mod_base = OTHER; note = 2'-O-methyluridine-3'-phosphorothioate 5'-(cis-5-(4-cyanophenyl)-3,3-dimethyl-1,2-dithiolan-4-yl thiophosphate)
  modified_base 2: mod_base = OTHER; note = 2'-deoxy-2'-fluorocytidine-3'-phosphorothioate
  modified_base 3: mod_base = OTHER; note = 2'-O-methyladenosine-3'-phosphate
  modified_base 4: mod_base = OTHER; note = 2'-O-methylcytidine-3'-phosphate
  modified_base 5: mod_base = OTHER; note = 2'-O-methyluridine-3'-phosphate
  modified_base 6: mod_base = OTHER; note = 2'-deoxy-2'-fluorouridine-3'-phosphate
  modified_base 7: mod_base = OTHER; note = 2'-O-methyluridine-3'-phosphate
  modified_base 8: mod_base = OTHER; note = 2'-deoxy-2'-fluoroadenosine-3'-phosphate
  modified_base 9: mod_base = OTHER; note = 2'-deoxy-2'-fluorouridine-3'-phosphate
  modified_base 10: mod_base = OTHER; note = 2'-O-methyluridine-3'-phosphate
  modified_base 11: mod_base = OTHER; note = 2'-O-methylguanosine-3'-phosphate
  modified_base 12: mod_base = OTHER; note = 2'-O-methyladenosine-3'-phosphate
  modified_base 13: mod_base = OTHER; note = 2'-O-methylguanosine-3'-phosphate
  modified_base 14: mod_base = OTHER; note = 2'-deoxy-2'-fluorouridine-3'-phosphate
  modified_base 15: mod_base = OTHER; note = 2'-O-methyluridine-3'-phosphate
  modified_base 16: mod_base = OTHER; note = 2'-deoxy-2'-fluorouridine-3'-phosphate
  modified_base 17: mod_base = OTHER; note = 2'-O-methylcytidine-3'-phosphate
  modified_base 18: mod_base = OTHER; note = 2'-O-methyluridine-3'-phosphate
  modified_base 19: mod_base = OTHER; note = 2'-O-methylguanosine-3'-phosphate
  modified_base 20: mod_base = OTHER; note = 2'-O-methyluridine-3'-phosphate
  modified_base 21: mod_base = OTHER; note = 2'-O-methylguanosine-3'-phosphorothioate
  modified_base 22: mod_base = OTHER; note = 2'-O-methylcytidine-3'-phosphorothioate
  modified_base 23: mod_base = OTHER; note = 2'-O-methylcytidine
tcactttattgagtttctgtgcc

SEQ ID NO: 242 - RNA, 21 nt, synthetic construct
  source 1..21: mol_type = other RNA
  modified_base 1: mod_base = OTHER; note = 2'-O-methylcytidine-3'-phosphorothioate
  modified_base 2: mod_base = OTHER; note = 2'-O-methyladenosine-3'-phosphorothioate
  modified_base 3: mod_base = OTHER; note = 2'-O-methylcytidine-3'-phosphate
  modified_base 4: mod_base = OTHER; note = 2'-O-methyladenosine-3'-phosphate
  modified_base 5: mod_base = OTHER; note = 2'-O-methylguanosine-3'-phosphate
  modified_base 6: mod_base = OTHER; note = 2'-O-methyladenosine-3'-phosphate
  modified_base 7: mod_base = OTHER; note = 2'-deoxy-2'-fluoroadenosine-3'-phosphate
  modified_base 8: mod_base = OTHER; note = 2'-O-methyladenosine-3'-phosphate
  modified_base 9: mod_base = OTHER; note = 2'-deoxy-2'-fluorocytidine-3'-phosphate
  modified_base 10: mod_base = OTHER; note = 2'-deoxy-2'-fluorouridine-3'-phosphate
  modified_base 11: mod_base = OTHER; note = 2'-deoxy-2'-fluorocytidine-3'-phosphate
  modified_base 12: mod_base = OTHER; note = 2'-O-methyladenosine-3'-phosphate
  modified_base 13: mod_base = OTHER; note = 2'-O-methyladenosine-3'-phosphate
  modified_base 14: mod_base = OTHER; note = 2'-O-methyluridine-3'-phosphate
  modified_base 15: mod_base = OTHER; note = 2'-O-methyladenosine-3'-phosphate
  modified_base 16: mod_base = OTHER; note = 2'-O-methyladenosine-3'-phosphate
  modified_base 17: mod_base = OTHER; note = 2'-O-methyladenosine-3'-phosphate
  modified_base 18: mod_base = OTHER; note = 2'-O-methylguanosine-3'-phosphate
  modified_base 19: mod_base = OTHER; note = 2'-O-methyluridine-3'-phosphate
  modified_base 20: mod_base = OTHER; note = 2'-O-methylguanosine-3'-phosphate
  modified_base 21: mod_base = OTHER; note = 2'-O-methyladenosine-3'-phosphate ((2S,4R)-1-[29-[[2-(acetylamino)-2-deoxy-beta-D-galactopyra nosyl]oxy]-14,14-bis[[3-[[3-[[5-[[2-(acetylamino)-2-deoxy-b eta-D-galactopyranosyl]oxy]-1-oxopentyl]amino]propyl]amino] -3-oxopropoxy]methyl]-1,12,19,25-tetraoxo-16-oxa-13,20,24-t riazanonacos-1-yl]-4-hydroxy-2-pyrrolidinyl)methyl ester
cacagaaactcaataaagtga

SEQ ID NO: 243 - RNA, 23 nt, synthetic construct
  source 1..23: mol_type = other RNA
  modified_base 1: mod_base = OTHER; note = 2'-O-methyluridine-3'-phosphorothioate 5'-(cis-5-(4-fluorophenyl)-3,3-dimethyl-1,2-dithiolan-4-yl thiophosphate)
  modified_base 2: mod_base = OTHER; note = 2'-deoxy-2'-fluorocytidine-3'-phosphorothioate
  modified_base 3: mod_base = OTHER; note = 2'-O-methyladenosine-3'-phosphate
  modified_base 4: mod_base = OTHER; note = 2'-O-methylcytidine-3'-phosphate
  modified_base 5: mod_base = OTHER; note = 2'-O-methyluridine-3'-phosphate
  modified_base 6: mod_base = OTHER; note = 2'-deoxy-2'-fluorouridine-3'-phosphate
  modified_base 7: mod_base = OTHER; note = 2'-O-methyluridine-3'-phosphate
  modified_base 8: mod_base = OTHER; note = 2'-deoxy-2'-fluoroadenosine-3'-phosphate
  modified_base 9: mod_base = OTHER; note = 2'-deoxy-2'-fluorouridine-3'-phosphate
  modified_base 10: mod_base = OTHER; note = 2'-O-methyluridine-3'-phosphate
  modified_base 11: mod_base = OTHER; note = 2'-O-methylguanosine-3'-phosphate
  modified_base 12: mod_base = OTHER; note = 2'-O-methyladenosine-3'-phosphate
  modified_base 13: mod_base = OTHER; note = 2'-O-methylguanosine-3'-phosphate
  modified_base 14: mod_base = OTHER; note = 2'-deoxy-2'-fluorouridine-3'-phosphate
  modified_base 15: mod_base = OTHER; note = 2'-O-methyluridine-3'-phosphate
  modified_base 16: mod_base = OTHER; note = 2'-deoxy-2'-fluorouridine-3'-phosphate
  modified_base 17: mod_base = OTHER; note = 2'-O-methylcytidine-3'-phosphate
  modified_base 18: mod_base = OTHER; note = 2'-O-methyluridine-3'-phosphate
  modified_base 19: mod_base = OTHER; note = 2'-O-methylguanosine-3'-phosphate
  modified_base 20: mod_base = OTHER; note = 2'-O-methyluridine-3'-phosphate
  modified_base 21: mod_base = OTHER; note = 2'-O-methylguanosine-3'-phosphorothioate
  modified_base 22: mod_base = OTHER; note = 2'-O-methylcytidine-3'-phosphorothioate
  modified_base 23: mod_base = OTHER; note = 2'-O-methylcytidine
tcactttattgagtttctgtgcc

SEQ ID NO: 244 - RNA, 21 nt, synthetic construct
  source 1..21: mol_type = other RNA
  modified_base 1: mod_base = OTHER; note = 2'-O-methylcytidine-3'-phosphorothioate
  modified_base 2: mod_base = OTHER; note = 2'-O-methyladenosine-3'-phosphorothioate
  modified_base 3: mod_base = OTHER; note = 2'-O-methylcytidine-3'-phosphate
  modified_base 4: mod_base = OTHER; note = 2'-O-methyladenosine-3'-phosphate
  modified_base 5: mod_base = OTHER; note = 2'-O-methylguanosine-3'-phosphate
  modified_base 6: mod_base = OTHER; note = 2'-O-methyladenosine-3'-phosphate
  modified_base 7: mod_base = OTHER; note = 2'-deoxy-2'-fluoroadenosine-3'-phosphate
  modified_base 8: mod_base = OTHER; note = 2'-O-methyladenosine-3'-phosphate
  modified_base 9: mod_base = OTHER; note = 2'-deoxy-2'-fluorocytidine-3'-phosphate
  modified_base 10: mod_base = OTHER; note = 2'-deoxy-2'-fluorouridine-3'-phosphate
  modified_base 11: mod_base = OTHER; note = 2'-deoxy-2'-fluorocytidine-3'-phosphate
  modified_base 12: mod_base = OTHER; note = 2'-O-methyladenosine-3'-phosphate
  modified_base 13: mod_base = OTHER; note = 2'-O-methyladenosine-3'-phosphate
  modified_base 14: mod_base = OTHER; note = 2'-O-methyluridine-3'-phosphate
  modified_base 15: mod_base = OTHER; note = 2'-O-methyladenosine-3'-phosphate
  modified_base 16: mod_base = OTHER; note = 2'-O-methyladenosine-3'-phosphate
  modified_base 17: mod_base = OTHER; note = 2'-O-methyladenosine-3'-phosphate
  modified_base 18: mod_base = OTHER; note = 2'-O-methylguanosine-3'-phosphate
  modified_base 19: mod_base = OTHER; note = 2'-O-methyluridine-3'-phosphate
  modified_base 20: mod_base = OTHER; note = 2'-O-methylguanosine-3'-phosphate
  modified_base 21: mod_base = OTHER; note = 2'-O-methyladenosine-3'-phosphate ((2S,4R)-1-[29-[[2-(acetylamino)-2-deoxy-beta-D-galactopyra nosyl]oxy]-14,14-bis[[3-[[3-[[5-[[2-(acetylamino)-2-deoxy-b eta-D-galactopyranosyl]oxy]-1-oxopentyl]amino]propyl]amino] -3-oxopropoxy]methyl]-1,12,19,25-tetraoxo-16-oxa-13,20,24-t riazanonacos-1-yl]-4-hydroxy-2-pyrrolidinyl)methyl ester
cacagaaactcaataaagtga

SEQ ID NO: 245 - RNA, 23 nt, synthetic construct
  source 1..23: mol_type = other RNA
  modified_base 1: mod_base = OTHER; note = 2'-O-methyluridine-3'-phosphorothioate 5'-(cis-5-(benzo[1,3]dioxol-6-yl)-3,3-dimethyl-1,2-dithiola n-4-yl thiophosphate)
  modified_base 2: mod_base = OTHER; note = 2'-deoxy-2'-fluorocytidine-3'-phosphorothioate
  modified_base 3: mod_base = OTHER; note = 2'-O-methyladenosine-3'-phosphate
  modified_base 4: mod_base = OTHER; note = 2'-O-methylcytidine-3'-phosphate
  modified_base 5: mod_base = OTHER; note = 2'-O-methyluridine-3'-phosphate
  modified_base 6: mod_base = OTHER; note = 2'-deoxy-2'-fluorouridine-3'-phosphate
  modified_base 7: mod_base = OTHER; note = 2'-O-methyluridine-3'-phosphate
  modified_base 8: mod_base = OTHER; note = 2'-deoxy-2'-fluoroadenosine-3'-phosphate
  modified_base 9: mod_base = OTHER; note = 2'-deoxy-2'-fluorouridine-3'-phosphate
  modified_base 10: mod_base = OTHER; note = 2'-O-methyluridine-3'-phosphate
  modified_base 11: mod_base = OTHER; note = 2'-O-methylguanosine-3'-phosphate
  modified_base 12: mod_base = OTHER; note = 2'-O-methyladenosine-3'-phosphate
  modified_base 13: mod_base = OTHER; note = 2'-O-methylguanosine-3'-phosphate
  modified_base 14: mod_base = OTHER; note = 2'-deoxy-2'-fluorouridine-3'-phosphate
  modified_base 15: mod_base = OTHER; note = 2'-O-methyluridine-3'-phosphate
  modified_base 16: mod_base = OTHER; note = 2'-deoxy-2'-fluorouridine-3'-phosphate
  modified_base 17: mod_base = OTHER; note = 2'-O-methylcytidine-3'-phosphate
  modified_base 18: mod_base = OTHER; note = 2'-O-methyluridine-3'-phosphate
  modified_base 19: mod_base = OTHER; note = 2'-O-methylguanosine-3'-phosphate
  modified_base 20: mod_base = OTHER; note = 2'-O-methyluridine-3'-phosphate
  modified_base 21: mod_base = OTHER; note = 2'-O-methylguanosine-3'-phosphorothioate
  modified_base 22: mod_base = OTHER; note = 2'-O-methylcytidine-3'-phosphorothioate
  modified_base 23: mod_base = OTHER; note = 2'-O-methylcytidine
tcactttattgagtttctgtgcc

SEQ ID NO: 246 - RNA, 21 nt, synthetic construct
  source 1..21: mol_type = other RNA
  modified_base 1: mod_base = OTHER; note = 2'-O-methylcytidine-3'-phosphorothioate
  modified_base 2: mod_base = OTHER; note = 2'-O-methyladenosine-3'-phosphorothioate
  modified_base 3: mod_base = OTHER; note = 2'-O-methylcytidine-3'-phosphate
  modified_base 4: mod_base = OTHER; note = 2'-O-methyladenosine-3'-phosphate
  modified_base 5: mod_base = OTHER; note = 2'-O-methylguanosine-3'-phosphate
  modified_base 6: mod_base = OTHER; note = 2'-O-methyladenosine-3'-phosphate
  modified_base 7: mod_base = OTHER; note = 2'-deoxy-2'-fluoroadenosine-3'-phosphate
  modified_base 8: mod_base = OTHER; note = 2'-O-methyladenosine-3'-phosphate
  modified_base 9: mod_base = OTHER; note = 2'-deoxy-2'-fluorocytidine-3'-phosphate
  modified_base 10: mod_base = OTHER; note = 2'-deoxy-2'-fluorouridine-3'-phosphate
  modified_base 11: mod_base = OTHER; note = 2'-deoxy-2'-fluorocytidine-3'-phosphate
  modified_base 12: mod_base = OTHER; note = 2'-O-methyladenosine-3'-phosphate
  modified_base 13: mod_base = OTHER; note = 2'-O-methyladenosine-3'-phosphate
  modified_base 14: mod_base = OTHER; note = 2'-O-methyluridine-3'-phosphate
  modified_base 15: mod_base = OTHER; note = 2'-O-methyladenosine-3'-phosphate
  modified_base 16: mod_base = OTHER; note = 2'-O-methyladenosine-3'-phosphate
  modified_base 17: mod_base = OTHER; note = 2'-O-methyladenosine-3'-phosphate
  modified_base 18: mod_base = OTHER; note = 2'-O-methylguanosine-3'-phosphate
  modified_base 19: mod_base = OTHER; note = 2'-O-methyluridine-3'-phosphate
  modified_base 20: mod_base = OTHER; note = 2'-O-methylguanosine-3'-phosphate
  modified_base 21: mod_base = OTHER; note = 2'-O-methyladenosine-3'-phosphate ((2S,4R)-1-[29-[[2-(acetylamino)-2-deoxy-beta-D-galactopyra nosyl]oxy]-14,14-bis[[3-[[3-[[5-[[2-(acetylamino)-2-deoxy-b eta-D-galactopyranosyl]oxy]-1-oxopentyl]amino]propyl]amino] -3-oxopropoxy]methyl]-1,12,19,25-tetraoxo-16-oxa-13,20,24-t riazanonacos-1-yl]-4-hydroxy-2-pyrrolidinyl)methyl ester
cacagaaactcaataaagtga

SEQ ID NO: 247 - RNA, 23 nt, synthetic construct
  source 1..23: mol_type = other RNA
  modified_base 1: mod_base = OTHER; note = 2'-O-methyluridine-3'-phosphorothioate 5'-(cis-5-(2-methylphenyl)-3,3-dimethyl-1,2-dithiolan-4-yl thiophosphate)
  modified_base 2: mod_base = OTHER; note = 2'-deoxy-2'-fluorocytidine-3'-phosphorothioate
  modified_base 3: mod_base = OTHER; note = 2'-O-methyladenosine-3'-phosphate
  modified_base 4: mod_base = OTHER; note = 2'-O-methylcytidine-3'-phosphate
  modified_base 5: mod_base = OTHER; note = 2'-O-methyluridine-3'-phosphate
  modified_base 6: mod_base = OTHER; note = 2'-deoxy-2'-fluorouridine-3'-phosphate
  modified_base 7: mod_base = OTHER; note = 2'-O-methyluridine-3'-phosphate
  modified_base 8: mod_base = OTHER; note = 2'-deoxy-2'-fluoroadenosine-3'-phosphate
  modified_base 9: mod_base = OTHER; note = 2'-deoxy-2'-fluorouridine-3'-phosphate
  modified_base 10: mod_base = OTHER; note = 2'-O-methyluridine-3'-phosphate
  modified_base 11: mod_base = OTHER; note = 2'-O-methylguanosine-3'-phosphate
  modified_base 12: mod_base = OTHER; note = 2'-O-methyladenosine-3'-phosphate
  modified_base 13: mod_base = OTHER; note = 2'-O-methylguanosine-3'-phosphate
  modified_base 14: mod_base = OTHER; note = 2'-deoxy-2'-fluorouridine-3'-phosphate
  modified_base 15: mod_base = OTHER; note = 2'-O-methyluridine-3'-phosphate
  modified_base 16: mod_base = OTHER; note = 2'-deoxy-2'-fluorouridine-3'-phosphate
  modified_base 17: mod_base = OTHER; note = 2'-O-methylcytidine-3'-phosphate
  modified_base 18: mod_base = OTHER; note = 2'-O-methyluridine-3'-phosphate
  modified_base 19: mod_base = OTHER; note = 2'-O-methylguanosine-3'-phosphate
  modified_base 20: mod_base = OTHER; note = 2'-O-methyluridine-3'-phosphate
  modified_base 21: mod_base = OTHER; note = 2'-O-methylguanosine-3'-phosphorothioate
  modified_base 22: mod_base = OTHER; note = 2'-O-methylcytidine-3'-phosphorothioate
  modified_base 23: mod_base = OTHER; note = 2'-O-methylcytidine
tcactttattgagtttctgtgcc

SEQ ID NO: 248 - RNA, 21 nt, synthetic construct
  source 1..21: mol_type = other RNA
  modified_base 1: mod_base = OTHER; note = 2'-O-methylcytidine-3'-phosphorothioate
  modified_base 2: mod_base = OTHER; note = 2'-O-methyladenosine-3'-phosphorothioate
  modified_base 3: mod_base = OTHER; note = 2'-O-methylcytidine-3'-phosphate
  modified_base 4: mod_base = OTHER; note = 2'-O-methyladenosine-3'-phosphate
  modified_base 5: mod_base = OTHER; note = 2'-O-methylguanosine-3'-phosphate
  modified_base 6: mod_base = OTHER; note = 2'-O-methyladenosine-3'-phosphate
  modified_base 7: mod_base = OTHER; note = 2'-deoxy-2'-fluoroadenosine-3'-phosphate
  modified_base 8: mod_base = OTHER; note = 2'-O-methyladenosine-3'-phosphate
  modified_base 9: mod_base = OTHER; note = 2'-deoxy-2'-fluorocytidine-3'-phosphate
  modified_base 10: mod_base = OTHER; note = 2'-deoxy-2'-fluorouridine-3'-phosphate
  modified_base 11: mod_base = OTHER; note = 2'-deoxy-2'-fluorocytidine-3'-phosphate
  modified_base 12: mod_base = OTHER; note = 2'-O-methyladenosine-3'-phosphate
  modified_base 13: mod_base = OTHER; note = 2'-O-methyladenosine-3'-phosphate
  modified_base 14: mod_base = OTHER; note = 2'-O-methyluridine-3'-phosphate
  modified_base 15: mod_base = OTHER; note = 2'-O-methyladenosine-3'-phosphate
  modified_base 16: mod_base = OTHER; note = 2'-O-methyladenosine-3'-phosphate
  modified_base 17: mod_base = OTHER; note = 2'-O-methyladenosine-3'-phosphate
  modified_base 18: mod_base = OTHER; note = 2'-O-methylguanosine-3'-phosphate
  modified_base 19: mod_base = OTHER; note = 2'-O-methyluridine-3'-phosphate
  modified_base 20: mod_base = OTHER; note = 2'-O-methylguanosine-3'-phosphate
  modified_base 21: mod_base = OTHER; note = 2'-O-methyladenosine-3'-phosphate ((2S,4R)-1-[29-[[2-(acetylamino)-2-deoxy-beta-D-galactopyra nosyl]oxy]-14,14-bis[[3-[[3-[[5-[[2-(acetylamino)-2-deoxy-b eta-D-galactopyranosyl]oxy]-1-oxopentyl]amino]propyl]amino] -3-oxopropoxy]methyl]-1,12,19,25-tetraoxo-16-oxa-13,20,24-t riazanonacos-1-yl]-4-hydroxy-2-pyrrolidinyl)methyl ester
cacagaaactcaataaagtga

SEQ ID NO: 249 - RNA, 23 nt, synthetic construct
  source 1..23: mol_type = other RNA
  modified_base 1: mod_base = OTHER; note = 2'-O-methyluridine-3'-phosphorothioate 5'-(cis-5-(2-methoxyphenyl)-3,3-dimethyl-1,2-dithiolan-4-yl thiophosphate)
  modified_base 2: mod_base = OTHER; note = 2'-deoxy-2'-fluorocytidine-3'-phosphorothioate
  modified_base 3: mod_base = OTHER; note = 2'-O-methyladenosine-3'-phosphate
  modified_base 4: mod_base = OTHER; note = 2'-O-methylcytidine-3'-phosphate
  modified_base 5: mod_base = OTHER; note = 2'-O-methyluridine-3'-phosphate
  modified_base 6: mod_base = OTHER; note = 2'-deoxy-2'-fluorouridine-3'-phosphate
  modified_base 7: mod_base = OTHER; note = 2'-O-methyluridine-3'-phosphate
  modified_base 8: mod_base = OTHER; note = 2'-deoxy-2'-fluoroadenosine-3'-phosphate
  modified_base 9: mod_base = OTHER; note = 2'-deoxy-2'-fluorouridine-3'-phosphate
  modified_base 10: mod_base = OTHER; note = 2'-O-methyluridine-3'-phosphate
  modified_base 11: mod_base = OTHER; note = 2'-O-methylguanosine-3'-phosphate
  modified_base 12: mod_base = OTHER; note = 2'-O-methyladenosine-3'-phosphate
  modified_base 13: mod_base = OTHER; note = 2'-O-methylguanosine-3'-phosphate
  modified_base 14: mod_base = OTHER; note = 2'-deoxy-2'-fluorouridine-3'-phosphate
  modified_base 15: mod_base = OTHER; note = 2'-O-methyluridine-3'-phosphate
  modified_base 16: mod_base = OTHER; note = 2'-deoxy-2'-fluorouridine-3'-phosphate
  modified_base 17: mod_base = OTHER; note = 2'-O-methylcytidine-3'-phosphate
  modified_base 18: mod_base = OTHER; note = 2'-O-methyluridine-3'-phosphate
  modified_base 19: mod_base = OTHER; note = 2'-O-methylguanosine-3'-phosphate
  modified_base 20: mod_base = OTHER; note = 2'-O-methyluridine-3'-phosphate
  modified_base 21: mod_base = OTHER; note = 2'-O-methylguanosine-3'-phosphorothioate
  modified_base 22: mod_base = OTHER; note = 2'-O-methylcytidine-3'-phosphorothioate
  modified_base 23: mod_base = OTHER; note = 2'-O-methylcytidine
tcactttattgagtttctgtgcc

SEQ ID NO: 250 - RNA, 21 nt, synthetic construct
  source 1..21: mol_type = other RNA
  modified_base 1: mod_base = OTHER; note = 2'-O-methylcytidine-3'-phosphorothioate
  modified_base 2: mod_base = OTHER; note = 2'-O-methyladenosine-3'-phosphorothioate
  modified_base 3: mod_base = OTHER; note = 2'-O-methylcytidine-3'-phosphate
  modified_base 4: mod_base = OTHER; note = 2'-O-methyladenosine-3'-phosphate
  modified_base 5: mod_base = OTHER; note = 2'-O-methylguanosine-3'-phosphate
  modified_base 6: mod_base = OTHER; note = 2'-O-methyladenosine-3'-phosphate
  modified_base 7: mod_base = OTHER; note = 2'-deoxy-2'-fluoroadenosine-3'-phosphate
  modified_base 8: mod_base = OTHER; note = 2'-O-methyladenosine-3'-phosphate
  modified_base 9: mod_base = OTHER; note = 2'-deoxy-2'-fluorocytidine-3'-phosphate
  modified_base 10: mod_base = OTHER; note = 2'-deoxy-2'-fluorouridine-3'-phosphate
  modified_base 11: mod_base = OTHER; note = 2'-deoxy-2'-fluorocytidine-3'-phosphate
  modified_base 12: mod_base = OTHER; note = 2'-O-methyladenosine-3'-phosphate
  modified_base 13: mod_base = OTHER; note = 2'-O-methyladenosine-3'-phosphate
  modified_base 14: mod_base = OTHER; note = 2'-O-methyluridine-3'-phosphate
  modified_base 15: mod_base = OTHER; note = 2'-O-methyladenosine-3'-phosphate
  modified_base 16: mod_base = OTHER; note = 2'-O-methyladenosine-3'-phosphate
  modified_base 17: mod_base = OTHER; note = 2'-O-methyladenosine-3'-phosphate
  modified_base 18: mod_base = OTHER; note = 2'-O-methylguanosine-3'-phosphate
  modified_base 19: mod_base = OTHER; note = 2'-O-methyluridine-3'-phosphate
  modified_base 20: mod_base = OTHER; note = 2'-O-methylguanosine-3'-phosphate
  modified_base 21: mod_base = OTHER; note = 2'-O-methyladenosine-3'-phosphate ((2S,4R)-1-[29-[[2-(acetylamino)-2-deoxy-beta-D-galactopyra nosyl]oxy]-14,14-bis[[3-[[3-[[5-[[2-(acetylamino)-2-deoxy-b eta-D-galactopyranosyl]oxy]-1-oxopentyl]amino]propyl]amino] -3-oxopropoxy]methyl]-1,12,19,25-tetraoxo-16-oxa-13,20,24-t riazanonacos-1-yl]-4-hydroxy-2-pyrrolidinyl)methyl ester
cacagaaactcaataaagtga

SEQ ID NO: 251 - RNA, 23 nt, synthetic construct
  source 1..23: mol_type = other RNA
  modified_base 1: mod_base = OTHER; note = 2'-O-methyluridine-3'-phosphorothioate 5'-((cis-3,3,5-trimethyl-1,2-dithiolan-4-yl) (1,3-dimethylimidazolidin-2-ylidene)phosphoramidate)
  modified_base 2: mod_base = OTHER; note = 2'-deoxy-2'-fluorocytidine-3'-phosphorothioate
  modified_base 3: mod_base = OTHER; note = 2'-O-methyladenosine-3'-phosphate
  modified_base 4: mod_base = OTHER; note = 2'-O-methylcytidine-3'-phosphate
  modified_base 5: mod_base = OTHER; note = 2'-O-methyluridine-3'-phosphate
  modified_base 6: mod_base = OTHER; note = 2'-deoxy-2'-fluorouridine-3'-phosphate
  modified_base 7: mod_base = OTHER; note = 2'-O-methyluridine-3'-phosphate
  modified_base 8: mod_base = OTHER; note = 2'-deoxy-2'-fluoroadenosine-3'-phosphate
  modified_base 9: mod_base = OTHER; note = 2'-deoxy-2'-fluorouridine-3'-phosphate
  modified_base 10: mod_base = OTHER; note = 2'-O-methyluridine-3'-phosphate
  modified_base 11: mod_base = OTHER; note = 2'-O-methylguanosine-3'-phosphate
  modified_base 12: mod_base = OTHER; note = 2'-O-methyladenosine-3'-phosphate
  modified_base 13: mod_base = OTHER; note = 2'-O-methylguanosine-3'-phosphate
  modified_base 14: mod_base = OTHER; note = 2'-deoxy-2'-fluorouridine-3'-phosphate
  modified_base 15: mod_base = OTHER; note = 2'-O-methyluridine-3'-phosphate
  modified_base 16: mod_base = OTHER; note = 2'-deoxy-2'-fluorouridine-3'-phosphate
  modified_base 17: mod_base = OTHER; note = 2'-O-methylcytidine-3'-phosphate
  modified_base 18: mod_base = OTHER; note = 2'-O-methyluridine-3'-phosphate
  modified_base 19: mod_base = OTHER; note = 2'-O-methylguanosine-3'-phosphate
  modified_base 20: mod_base = OTHER; note = 2'-O-methyluridine-3'-phosphate
  modified_base 21: mod_base = OTHER; note = 2'-O-methylguanosine-3'-phosphorothioate
  modified_base 22: mod_base = OTHER; note = 2'-O-methylcytidine-3'-phosphorothioate
  modified_base 23: mod_base = OTHER; note = 2'-O-methylcytidine
tcactttattgagtttctgtgcc

SEQ ID NO: 252 - RNA, 21 nt, synthetic construct
  source 1..21: mol_type = other RNA
  modified_base 1: mod_base = OTHER; note = 2'-O-methylcytidine-3'-phosphorothioate
  modified_base 2: mod_base = OTHER; note = 2'-O-methyladenosine-3'-phosphorothioate
  modified_base 3: mod_base = OTHER; note = 2'-O-methylcytidine-3'-phosphate
  modified_base 4: mod_base = OTHER; note = 2'-O-methyladenosine-3'-phosphate
  modified_base 5: mod_base = OTHER; note = 2'-O-methylguanosine-3'-phosphate
  modified_base 6: mod_base = OTHER; note = 2'-O-methyladenosine-3'-phosphate
  modified_base 7: mod_base = OTHER; note = 2'-deoxy-2'-fluoroadenosine-3'-phosphate
  modified_base 8: mod_base = OTHER; note = 2'-O-methyladenosine-3'-phosphate
  modified_base 9: mod_base = OTHER; note = 2'-deoxy-2'-fluorocytidine-3'-phosphate
  modified_base 10: mod_base = OTHER; note = 2'-deoxy-2'-fluorouridine-3'-phosphate
  modified_base 11: mod_base = OTHER; note = 2'-deoxy-2'-fluorocytidine-3'-phosphate
  modified_base 12: mod_base = OTHER; note = 2'-O-methyladenosine-3'-phosphate
  modified_base 13: mod_base = OTHER; note = 2'-O-methyladenosine-3'-phosphate
  modified_base 14: mod_base = OTHER; note = 2'-O-methyluridine-3'-phosphate
  modified_base 15: mod_base = OTHER; note = 2'-O-methyladenosine-3'-phosphate
  modified_base 16: mod_base = OTHER; note = 2'-O-methyladenosine-3'-phosphate
  modified_base 17: mod_base = OTHER; note = 2'-O-methyladenosine-3'-phosphate
  modified_base 18: mod_base = OTHER; note = 2'-O-methylguanosine-3'-phosphate
  modified_base 19: mod_base = OTHER; note = 2'-O-methyluridine-3'-phosphate
  modified_base 20: mod_base = OTHER; note = 2'-O-methylguanosine-3'-phosphate
  modified_base 21: mod_base = OTHER; note = 2'-O-methyladenosine-3'-phosphate ((2S,4R)-1-[29-[[2-(acetylamino)-2-deoxy-beta-D-galactopyra nosyl]oxy]-14,14-bis[[3-[[3-[[5-[[2-(acetylamino)-2-deoxy-b eta-D-galactopyranosyl]oxy]-1-oxopentyl]amino]propyl]amino] -3-oxopropoxy]methyl]-1,12,19,25-tetraoxo-16-oxa-13,20,24-t riazanonacos-1-yl]-4-hydroxy-2-pyrrolidinyl)methyl ester
cacagaaactcaataaagtga

SEQ ID NO: 253 - RNA, 23 nt, synthetic construct
  source 1..23: mol_type = other RNA
  modified_base 1: mod_base = OTHER; note = 2'-O-methyluridine-3'-phosphorothioate 5'-((cis-3,3,5-trimethyl-1,2-dithiolan-4-yl) (N-methylsulfonyl) phosphimidate)
  modified_base 2: mod_base = OTHER; note = 2'-deoxy-2'-fluorocytidine-3'-phosphorothioate
  modified_base 3: mod_base = OTHER; note = 2'-O-methyladenosine-3'-phosphate
  modified_base 4: mod_base = OTHER; note = 2'-O-methylcytidine-3'-phosphate
  modified_base 5: mod_base = OTHER; note = 2'-O-methyluridine-3'-phosphate
  modified_base 6: mod_base = OTHER; note = 2'-deoxy-2'-fluorouridine-3'-phosphate
  modified_base 7: mod_base = OTHER; note = 2'-O-methyluridine-3'-phosphate
  modified_base 8: mod_base = OTHER; note = 2'-deoxy-2'-fluoroadenosine-3'-phosphate
  modified_base 9: mod_base = OTHER; note = 2'-deoxy-2'-fluorouridine-3'-phosphate
  modified_base 10: mod_base = OTHER; note = 2'-O-methyluridine-3'-phosphate
  modified_base 11: mod_base = OTHER; note = 2'-O-methylguanosine-3'-phosphate
  modified_base 12: mod_base = OTHER; note = 2'-O-methyladenosine-3'-phosphate
  modified_base 13: mod_base = OTHER; note = 2'-O-methylguanosine-3'-phosphate
  modified_base 14: mod_base = OTHER; note = 2'-deoxy-2'-fluorouridine-3'-phosphate
  modified_base 15: mod_base = OTHER; note = 2'-O-methyluridine-3'-phosphate
  modified_base 16: mod_base = OTHER; note = 2'-deoxy-2'-fluorouridine-3'-phosphate
  modified_base 17: mod_base = OTHER; note = 2'-O-methylcytidine-3'-phosphate
  modified_base 18: mod_base = OTHER; note = 2'-O-methyluridine-3'-phosphate
  modified_base 19: mod_base = OTHER; note = 2'-O-methylguanosine-3'-phosphate
  modified_base 20: mod_base = OTHER; note = 2'-O-methyluridine-3'-phosphate
  modified_base 21: mod_base = OTHER; note = 2'-O-methylguanosine-3'-phosphorothioate
  modified_base 22: mod_base = OTHER; note = 2'-O-methylcytidine-3'-phosphorothioate
  modified_base 23: mod_base = OTHER; note = 2'-O-methylcytidine
tcactttattgagtttctgtgcc

SEQ ID NO: 254 - RNA, 21 nt, synthetic construct
  source 1..21: mol_type = other RNA
  modified_base 1: mod_base = OTHER; note = 2'-O-methylcytidine-3'-phosphorothioate
  modified_base 2: mod_base = OTHER; note = 2'-O-methyladenosine-3'-phosphorothioate
  modified_base 3: mod_base = OTHER; note = 2'-O-methylcytidine-3'-phosphate
  modified_base 4: mod_base = OTHER; note = 2'-O-methyladenosine-3'-phosphate
  modified_base 5: mod_base = OTHER; note = 2'-O-methylguanosine-3'-phosphate
  modified_base 6: mod_base = OTHER; note = 2'-O-methyladenosine-3'-phosphate
  modified_base 7: mod_base = OTHER; note = 2'-deoxy-2'-fluoroadenosine-3'-phosphate
  modified_base 8: mod_base = OTHER; note = 2'-O-methyladenosine-3'-phosphate
  modified_base 9: mod_base = OTHER; note = 2'-deoxy-2'-fluorocytidine-3'-phosphate
  modified_base 10: mod_base = OTHER; note = 2'-deoxy-2'-fluorouridine-3'-phosphate
  modified_base 11: mod_base = OTHER; note = 2'-deoxy-2'-fluorocytidine-3'-phosphate
  modified_base 12: mod_base = OTHER; note = 2'-O-methyladenosine-3'-phosphate
  modified_base 13: mod_base = OTHER; note = 2'-O-methyladenosine-3'-phosphate
  modified_base 14: mod_base = OTHER; note = 2'-O-methyluridine-3'-phosphate
  modified_base 15: mod_base = OTHER; note = 2'-O-methyladenosine-3'-phosphate
  modified_base 16: mod_base = OTHER; note = 2'-O-methyladenosine-3'-phosphate
  modified_base 17: mod_base = OTHER; note = 2'-O-methyladenosine-3'-phosphate
  modified_base 18: mod_base = OTHER; note = 2'-O-methylguanosine-3'-phosphate
  modified_base 19: mod_base = OTHER; note = 2'-O-methyluridine-3'-phosphate
  modified_base 20: mod_base = OTHER; note = 2'-O-methylguanosine-3'-phosphate
  modified_base 21: mod_base = OTHER; note = 2'-O-methyladenosine-3'-phosphate ((2S,4R)-1-[29-[[2-(acetylamino)-2-deoxy-beta-D-galactopyra nosyl]oxy]-14,14-bis[[3-[[3-[[5-[[2-(acetylamino)-2-deoxy-b eta-D-galactopyranosyl]oxy]-1-oxopentyl]amino]propyl]amino] -3-oxopropoxy]methyl]-1,12,19,25-tetraoxo-16-oxa-13,20,24-t riazanonacos-1-yl]-4-hydroxy-2-pyrrolidinyl)methyl ester
cacagaaactcaataaagtga

SEQ ID NO: 255 - RNA, 23 nt, synthetic construct
  source 1..23: mol_type = other RNA
  modified_base 1: mod_base = OTHER; note = 2'-O-methyluridine-3'-phosphorothioate 5'-((cis-3,3-dimethyl-5-phenyl-1,2-dithiolan-4-yl) (1,3-dimethylimidazolidin-2-ylidene)phosphoramidate)
  modified_base 2: mod_base = OTHER; note = 2'-deoxy-2'-fluorocytidine-3'-phosphorothioate
  modified_base 3: mod_base = OTHER; note = 2'-O-methyladenosine-3'-phosphate
  modified_base 4: mod_base = OTHER; note = 2'-O-methylcytidine-3'-phosphate
  modified_base 5: mod_base = OTHER; note = 2'-O-methyluridine-3'-phosphate
  modified_base 6: mod_base = OTHER; note = 2'-deoxy-2'-fluorouridine-3'-phosphate
  modified_base 7: mod_base = OTHER; note = 2'-O-methyluridine-3'-phosphate
  modified_base 8: mod_base = OTHER; note = 2'-deoxy-2'-fluoroadenosine-3'-phosphate
  modified_base 9: mod_base = OTHER; note = 2'-deoxy-2'-fluorouridine-3'-phosphate
  modified_base 10: mod_base = OTHER; note = 2'-O-methyluridine-3'-phosphate
  modified_base 11: mod_base = OTHER; note = 2'-O-methylguanosine-3'-phosphate
  modified_base 12: mod_base = OTHER; note = 2'-O-methyladenosine-3'-phosphate
  modified_base 13: mod_base = OTHER; note = 2'-O-methylguanosine-3'-phosphate
  modified_base 14: mod_base = OTHER; note = 2'-deoxy-2'-fluorouridine-3'-phosphate
  modified_base 15: mod_base = OTHER; note = 2'-O-methyluridine-3'-phosphate
  modified_base 16: mod_base = OTHER; note = 2'-deoxy-2'-fluorouridine-3'-phosphate
  modified_base 17: mod_base = OTHER; note = 2'-O-methylcytidine-3'-phosphate
  modified_base 18: mod_base = OTHER; note = 2'-O-methyluridine-3'-phosphate
  modified_base 19: mod_base = OTHER; note = 2'-O-methylguanosine-3'-phosphate
  modified_base 20: mod_base = OTHER; note = 2'-O-methyluridine-3'-phosphate
  modified_base 21: mod_base = OTHER; note = 2'-O-methylguanosine-3'-phosphorothioate
  modified_base 22: mod_base = OTHER; note = 2'-O-methylcytidine-3'-phosphorothioate
  modified_base 23: mod_base = OTHER; note = 2'-O-methylcytidine
tcactttattgagtttctgtgcc

SEQ ID NO: 256 - RNA, 21 nt, synthetic construct
  source 1..21: mol_type = other RNA
  modified_base 1: mod_base = OTHER; note = 2'-O-methylcytidine-3'-phosphorothioate
  modified_base 2: mod_base = OTHER; note = 2'-O-methyladenosine-3'-phosphorothioate
  modified_base 3: mod_base = OTHER; note = 2'-O-methylcytidine-3'-phosphate
  modified_base 4: mod_base = OTHER; note = 2'-O-methyladenosine-3'-phosphate
  modified_base 5: mod_base = OTHER; note = 2'-O-methylguanosine-3'-phosphate
  modified_base 6: mod_base = OTHER; note = 2'-O-methyladenosine-3'-phosphate
  modified_base 7: mod_base = OTHER; note = 2'-deoxy-2'-fluoroadenosine-3'-phosphate
  modified_base 8: mod_base = OTHER; note = 2'-O-methyladenosine-3'-phosphate
  modified_base 9: mod_base = OTHER; note = 2'-deoxy-2'-fluorocytidine-3'-phosphate
  modified_base 10: mod_base = OTHER; note = 2'-deoxy-2'-fluorouridine-3'-phosphate
  modified_base 11: mod_base = OTHER; note = 2'-deoxy-2'-fluorocytidine-3'-phosphate
  modified_base 12: mod_base = OTHER; note = 2'-O-methyladenosine-3'-phosphate
  modified_base 13: mod_base = OTHER; note = 2'-O-methyladenosine-3'-phosphate
  modified_base 14: mod_base = OTHER; note = 2'-O-methyluridine-3'-phosphate
  modified_base 15: mod_base = OTHER; note = 2'-O-methyladenosine-3'-phosphate
  modified_base 16: mod_base = OTHER; note = 2'-O-methyladenosine-3'-phosphate
  modified_base 17: mod_base = OTHER; note = 2'-O-methyladenosine-3'-phosphate
  modified_base 18: mod_base = OTHER; note = 2'-O-methylguanosine-3'-phosphate
  modified_base 19: mod_base = OTHER; note = 2'-O-methyluridine-3'-phosphate
  modified_base 20: mod_base = OTHER; note = 2'-O-methylguanosine-3'-phosphate
  modified_base 21: mod_base = OTHER; note = 2'-O-methyladenosine-3'-phosphate ((2S,4R)-1-[29-[[2-(acetylamino)-2-deoxy-beta-D-galactopyra nosyl]oxy]-14,14-bis[[3-[[3-[[5-[[2-(acetylamino)-2-deoxy-b eta-D-galactopyranosyl]oxy]-1-oxopentyl]amino]propyl]amino] -3-oxopropoxy]methyl]-1,12,19,25-tetraoxo-16-oxa-13,20,24-t riazanonacos-1-yl]-4-hydroxy-2-pyrrolidinyl)methyl ester
cacagaaactcaataaagtga

SEQ ID NO: 257 - RNA, 23 nt, synthetic construct
  source 1..23: mol_type = other RNA
  modified_base 1: mod_base = OTHER; note = 2'-O-methyluridine-3'-phosphorothioate 5'-(cis-5-phenyl-3,3-dimethyl-1,2-dithiolan-4-yl (N-methylsulfonyl) phosphimidate)
  modified_base 2: mod_base = OTHER; note = 2'-deoxy-2'-fluorocytidine-3'-phosphorothioate
  modified_base 3: mod_base = OTHER; note = 2'-O-methyladenosine-3'-phosphate
  modified_base 4: mod_base = OTHER; note = 2'-O-methylcytidine-3'-phosphate
  modified_base 5: mod_base = OTHER; note = 2'-O-methyluridine-3'-phosphate
  modified_base 6: mod_base = OTHER; note = 2'-deoxy-2'-fluorouridine-3'-phosphate
  modified_base 7: mod_base = OTHER; note = 2'-O-methyluridine-3'-phosphate
  modified_base 8: mod_base = OTHER; note = 2'-deoxy-2'-fluoroadenosine-3'-phosphate
  modified_base 9: mod_base = OTHER; note = 2'-deoxy-2'-fluorouridine-3'-phosphate
  modified_base 10: mod_base = OTHER; note = 2'-O-methyluridine-3'-phosphate
  modified_base 11: mod_base = OTHER; note = 2'-O-methylguanosine-3'-phosphate
  modified_base 12: mod_base = OTHER; note = 2'-O-methyladenosine-3'-phosphate
  modified_base 13: mod_base = OTHER; note = 2'-O-methylguanosine-3'-phosphate
  modified_base 14: mod_base = OTHER; note = 2'-deoxy-2'-fluorouridine-3'-phosphate
  modified_base 15: mod_base = OTHER; note = 2'-O-methyluridine-3'-phosphate
  modified_base 16: mod_base = OTHER; note = 2'-deoxy-2'-fluorouridine-3'-phosphate
  modified_base 17: mod_base = OTHER; note = 2'-O-methylcytidine-3'-phosphate
  modified_base 18: mod_base = OTHER; note = 2'-O-methyluridine-3'-phosphate
  modified_base 19: mod_base = OTHER; note = 2'-O-methylguanosine-3'-phosphate
  modified_base 20: mod_base = OTHER; note = 2'-O-methyluridine-3'-phosphate
  modified_base 21: mod_base = OTHER; note = 2'-O-methylguanosine-3'-phosphorothioate
  modified_base 22: mod_base = OTHER; note = 2'-O-methylcytidine-3'-phosphorothioate
  modified_base 23: mod_base = OTHER; note = 2'-O-methylcytidine
tcactttattgagtttctgtgcc

SEQ ID NO: 258 - RNA, 21 nt, synthetic construct
  source 1..21: mol_type = other RNA
  modified_base 1: mod_base = OTHER; note = 2'-O-methyluridine-3'-phosphorothioate
  modified_base 2: mod_base = OTHER; note = 2'-O-methyluridine-3'-phosphorothioate
  modified_base 3: mod_base = OTHER; note = 2'-O-methylguanosine-3'-phosphate
  modified_base 4: mod_base = OTHER; note = 2'-O-methylguanosine-3'-phosphate
  modified_base 5: mod_base = OTHER; note = 2'-O-methylguanosine-3'-phosphate
  modified_base 6: mod_base = OTHER; note = 2'-O-hexadecyl-cytidine-3'-phosphate
  modified_base 7: mod_base = OTHER; note = 2'-deoxy-2'-fluoroadenosine-3'-phosphate
  modified_base 8: mod_base = OTHER; note = 2'-O-methyladenosine-3'-phosphate
  modified_base 9: mod_base = OTHER; note = 2'-deoxy-2'-fluoroadenosine-3'-phosphate
  modified_base 10: mod_base = OTHER; note = 2'-deoxy-2'-fluoroguanosine-3'-phosphate
  modified_base 11: mod_base = OTHER; note = 2'-deoxy-2'-fluoroguanosine-3'-phosphate
  modified_base 12: mod_base = OTHER; note = 2'-O-methyluridine-3'-phosphate
  modified_base 13: mod_base = OTHER; note = 2'-O-methylguanosine-3'-phosphate
  modified_base 14: mod_base = OTHER; note = 2'-O-methylguanosine-3'-phosphate
  modified_base 15: mod_base = OTHER; note = 2'-O-methyladenosine-3'-phosphate
  modified_base 16: mod_base = OTHER; note = 2'-O-methyladenosine-3'-phosphate
  modified_base 17: mod_base = OTHER; note = 2'-O-methyladenosine-3'-phosphate
  modified_base 18: mod_base = OTHER; note = 2'-O-methyluridine-3'-phosphate
  modified_base 19: mod_base = OTHER; note = 2'-O-methylguanosine-3'-phosphorothioate
  modified_base 20: mod_base = OTHER; note = 2'-O-methyladenosine-3'-phosphorothioate
  modified_base 21: mod_base = OTHER; note = 2'-O-methyladenosine
ttgggcaaaggtggaaatgaa

SEQ ID NO: 259 - RNA, 23 nt, synthetic construct
  source 1..23: mol_type = other RNA
  modified_base 1: mod_base = OTHER; note = 2'-O-methyluridine-3'-phosphorothioate
  modified_base 2: mod_base = OTHER; note = 2'-deoxy-2'-fluorouridine-3'-phosphorothioate
  modified_base 3: mod_base = OTHER; note = 2'-O-methylcytidine-3'-phosphate
  modified_base 4: mod_base = OTHER; note = 2'-O-methyladenosine-3'-phosphate
  modified_base 5: mod_base = OTHER; note = 2'-O-methyluridine-3'-phosphate
  modified_base 6: mod_base = OTHER; note = 2'-deoxy-2'-fluorouridine-3'-phosphate
  modified_base 7: mod_base = OTHER; note = 2'-O-methyluridine-3'-phosphate
  modified_base 8: mod_base = OTHER; note = 2'-deoxy-2'-fluorocytidine-3'-phosphate
  modified_base 9: mod_base = OTHER; note = 2'-deoxy-2'-fluorocytidine-3'-phosphate
  modified_base 10: mod_base = OTHER; note = 2'-O-methyladenosine-3'-phosphate
  modified_base 11: mod_base = OTHER; note = 2'-O-methylcytidine-3'-phosphate
  modified_base 12: mod_base = OTHER; note = 2'-O-methylcytidine-3'-phosphate
  modified_base 13: mod_base = OTHER; note = 2'-O-methyluridine-3'-phosphate
  modified_base 14: mod_base = OTHER; note = 2'-deoxy-2'-fluorouridine-3'-phosphate
  modified_base 15: mod_base = OTHER; note = 2'-O-methyluridine-3'-phosphate
  modified_base 16: mod_base = OTHER; note = 2'-deoxy-2'-fluoroguanosine-3'-phosphate
  modified_base 17: mod_base = OTHER; note = 2'-O-methylcytidine-3'-phosphate
  modified_base 18: mod_base = OTHER; note = 2'-O-methylcytidine-3'-phosphate
  modified_base 19: mod_base = OTHER; note = 2'-O-methylcytidine-3'-phosphate
  modified_base 20: mod_base = OTHER; note = 2'-O-methyladenosine-3'-phosphate
  modified_base 21: mod_base = OTHER; note = 2'-O-methyladenosine-3'-phosphorothioate
  modified_base 22: mod_base = OTHER; note = 2'-O-methylguanosine-3'-phosphorothioate
  modified_base 23: mod_base = OTHER; note = 2'-O-methylcytidine
ttcatttccacctttgcccaagc

SEQ ID NO: 260 - RNA, 21 nt, synthetic construct
  source 1..21: mol_type = other RNA
  modified_base 1: mod_base = OTHER; note = 2'-O-methyluridine-3'-phosphorothioate
  modified_base 2: mod_base = OTHER; note = 2'-O-methyluridine-3'-phosphorothioate
  modified_base 3: mod_base = OTHER; note = 2'-O-methylguanosine-3'-phosphate
  modified_base 4: mod_base = OTHER; note = 2'-O-methylguanosine-3'-phosphate
  modified_base 5: mod_base = OTHER; note = 2'-O-methylguanosine-3'-phosphate
  modified_base 6: mod_base = OTHER; note = 2'-O-hexadecyl-cytidine-3'-phosphate
  modified_base 7: mod_base = OTHER; note = 2'-deoxy-2'-fluoroadenosine-3'-phosphate
  modified_base 8: mod_base = OTHER; note = 2'-O-methyladenosine-3'-phosphate
  modified_base 9: mod_base = OTHER; note = 2'-deoxy-2'-fluoroadenosine-3'-phosphate
  modified_base 10: mod_base = OTHER; note = 2'-deoxy-2'-fluoroguanosine-3'-phosphate
  modified_base 11: mod_base = OTHER; note = 2'-deoxy-2'-fluoroguanosine-3'-phosphate
  modified_base 12: mod_base = OTHER; note = 2'-O-methyluridine-3'-phosphate
  modified_base 13: mod_base = OTHER; note = 2'-O-methylguanosine-3'-phosphate
  modified_base 14: mod_base = OTHER; note = 2'-O-methylguanosine-3'-phosphate
  modified_base 15: mod_base = OTHER; note = 2'-O-methyladenosine-3'-phosphate
  modified_base 16: mod_base = OTHER; note = 2'-O-methyladenosine-3'-phosphate
  modified_base 17: mod_base = OTHER; note = 2'-O-methyladenosine-3'-phosphate
  modified_base 18: mod_base = OTHER; note = 2'-O-methyluridine-3'-phosphate
  modified_base 19: mod_base = OTHER; note = 2'-O-methylguanosine-3'-phosphorothioate
  modified_base 20: mod_base = OTHER; note = 2'-O-methyladenosine-3'-phosphorothioate
  modified_base 21: mod_base = OTHER; note = 2'-O-methyladenosine
ttgggcaaaggtggaaatgaa

SEQ ID NO: 261 - RNA, 23 nt, synthetic construct
  source 1..23: mol_type = other RNA
  modified_base 1: mod_base = OTHER; note = 2'-O-methyluridine-3'-phosphorothioate 5'-(E)-Vinylphosphonate
  modified_base 2: mod_base = OTHER; note = 2'-deoxy-2'-fluorouridine-3'-phosphorothioate
  modified_base 3: mod_base = OTHER; note = 2'-O-methylcytidine-3'-phosphate
  modified_base 4: mod_base = OTHER; note = 2'-O-methyladenosine-3'-phosphate
  modified_base 5: mod_base = OTHER; note = 2'-O-methyluridine-3'-phosphate
  modified_base 6: mod_base = OTHER; note = 2'-deoxy-2'-fluorouridine-3'-phosphate
  modified_base 7: mod_base = OTHER; note = 2'-O-methyluridine-3'-phosphate
  modified_base 8: mod_base = OTHER; note = 2'-deoxy-2'-fluorocytidine-3'-phosphate
  modified_base 9: mod_base = OTHER; note = 2'-deoxy-2'-fluorocytidine-3'-phosphate
  modified_base 10: mod_base = OTHER; note = 2'-O-methyladenosine-3'-phosphate
  modified_base 11: mod_base = OTHER; note = 2'-O-methylcytidine-3'-phosphate
  modified_base 12: mod_base = OTHER; note = 2'-O-methylcytidine-3'-phosphate
  modified_base 13: mod_base = OTHER; note = 2'-O-methyluridine-3'-phosphate
  modified_base 14: mod_base = OTHER; note = 2'-deoxy-2'-fluorouridine-3'-phosphate
  modified_base 15: mod_base = OTHER; note = 2'-O-methyluridine-3'-phosphate
  modified_base 16: mod_base = OTHER; note = 2'-deoxy-2'-fluoroguanosine-3'-phosphate
  modified_base 17: mod_base = OTHER; note = 2'-O-methylcytidine-3'-phosphate
  modified_base 18: mod_base = OTHER; note = 2'-O-methylcytidine-3'-phosphate
  modified_base 19: mod_base = OTHER; note = 2'-O-methylcytidine-3'-phosphate
  modified_base 20: mod_base = OTHER; note = 2'-O-methyladenosine-3'-phosphate
  modified_base 21: mod_base = OTHER; note = 2'-O-methyladenosine-3'-phosphorothioate
  modified_base 22: mod_base = OTHER; note = 2'-O-methylguanosine-3'-phosphorothioate
  modified_base 23: mod_base = OTHER; note = 2'-O-methylcytidine
ttcatttccacctttgcccaagc

SEQ ID NO: 262 - RNA, 21 nt, synthetic construct
  source 1..21: mol_type = other RNA
  modified_base 1: mod_base = OTHER; note = 2'-O-methyluridine-3'-phosphorothioate
  modified_base 2: mod_base = OTHER; note = 2'-O-methyluridine-3'-phosphorothioate
  modified_base 3: mod_base = OTHER; note = 2'-O-methylguanosine-3'-phosphate
  modified_base 4: mod_base = OTHER; note = 2'-O-methylguanosine-3'-phosphate
  modified_base 5: mod_base = OTHER; note = 2'-O-methylguanosine-3'-phosphate
  modified_base 6: mod_base = OTHER; note = 2'-O-hexadecyl-cytidine-3'-phosphate
  modified_base 7: mod_base = OTHER; note = 2'-deoxy-2'-fluoroadenosine-3'-phosphate
  modified_base 8: mod_base = OTHER; note = 2'-O-methyladenosine-3'-phosphate
  modified_base 9: mod_base = OTHER; note = 2'-deoxy-2'-fluoroadenosine-3'-phosphate
  modified_base 10: mod_base = OTHER; note = 2'-deoxy-2'-fluoroguanosine-3'-phosphate
  modified_base 11: mod_base = OTHER; note = 2'-deoxy-2'-fluoroguanosine-3'-phosphate
  modified_base 12: mod_base = OTHER; note = 2'-O-methyluridine-3'-phosphate
  modified_base 13: mod_base = OTHER; note = 2'-O-methylguanosine-3'-phosphate
  modified_base 14: mod_base = OTHER; note = 2'-O-methylguanosine-3'-phosphate
  modified_base 15: mod_base = OTHER; note = 2'-O-methyladenosine-3'-phosphate
  modified_base 16: mod_base = OTHER; note = 2'-O-methyladenosine-3'-phosphate
  modified_base 17: mod_base = OTHER; note = 2'-O-methyladenosine-3'-phosphate
  modified_base 18: mod_base = OTHER; note = 2'-O-methyluridine-3'-phosphate
  modified_base 19: mod_base = OTHER; note = 2'-O-methylguanosine-3'-phosphorothioate
  modified_base 20: mod_base = OTHER; note = 2'-O-methyladenosine-3'-phosphorothioate
  modified_base 21: mod_base = OTHER; note = 2'-O-methyladenosine
ttgggcaaaggtggaaatgaa

SEQ ID NO: 263 - RNA, 23 nt, synthetic construct
  source 1..23: mol_type = other RNA
  modified_base 1: mod_base = OTHER; note = 2'-O-methyluridine-3'-phosphorothioate 5'-(cis-3,3,5-trimethyl-1,2-dithiolan-4-yl thiophosphate)
  modified_base 2: mod_base = OTHER; note = 2'-deoxy-2'-fluorouridine-3'-phosphorothioate
  modified_base 3: mod_base = OTHER; note = 2'-O-methylcytidine-3'-phosphate
  modified_base 4: mod_base = OTHER; note = 2'-O-methyladenosine-3'-phosphate
  modified_base 5: mod_base = OTHER; note = 2'-O-methyluridine-3'-phosphate
  modified_base 6: mod_base = OTHER; note = 2'-deoxy-2'-fluorouridine-3'-phosphate
  modified_base 7: mod_base = OTHER; note = 2'-O-methyluridine-3'-phosphate
  modified_base 8: mod_base = OTHER; note = 2'-deoxy-2'-fluorocytidine-3'-phosphate
  modified_base 9: mod_base = OTHER; note = 2'-deoxy-2'-fluorocytidine-3'-phosphate
  modified_base 10: mod_base = OTHER; note = 2'-O-methyladenosine-3'-phosphate
  modified_base 11: mod_base = OTHER; note = 2'-O-methylcytidine-3'-phosphate
  modified_base 12: mod_base = OTHER; note = 2'-O-methylcytidine-3'-phosphate
  modified_base 13: mod_base = OTHER; note = 2'-O-methyluridine-3'-phosphate
  modified_base 14: mod_base = OTHER; note = 2'-deoxy-2'-fluorouridine-3'-phosphate
  modified_base 15: mod_base = OTHER; note = 2'-O-methyluridine-3'-phosphate
  modified_base 16: mod_base = OTHER; note = 2'-deoxy-2'-fluoroguanosine-3'-phosphate
  modified_base 17: mod_base = OTHER; note = 2'-O-methylcytidine-3'-phosphate
  modified_base 18: mod_base = OTHER; note = 2'-O-methylcytidine-3'-phosphate
  modified_base 19: mod_base = OTHER; note = 2'-O-methylcytidine-3'-phosphate
  modified_base 20: mod_base = OTHER; note = 2'-O-methyladenosine-3'-phosphate
  modified_base 21: mod_base = OTHER; note = 2'-O-methyladenosine-3'-phosphorothioate
  modified_base 22: mod_base = OTHER; note = 2'-O-methylguanosine-3'-phosphorothioate
  modified_base 23: mod_base = OTHER; note = 2'-O-methylcytidine
ttcatttccacctttgcccaagc

SEQ ID NO: 264 - RNA, 21 nt, synthetic construct
  source 1..21: mol_type = other RNA
  modified_base 1: mod_base = OTHER; note = 2'-O-methyluridine-3'-phosphorothioate
  modified_base 2: mod_base = OTHER; note = 2'-O-methyluridine-3'-phosphorothioate
  modified_base 3: mod_base = OTHER; note = 2'-O-methylguanosine-3'-phosphate
  modified_base 4: mod_base = OTHER; note = 2'-O-methylguanosine-3'-phosphate
  modified_base 5: mod_base = OTHER; note = 2'-O-methylguanosine-3'-phosphate
  modified_base 6: mod_base = OTHER; note = 2'-O-hexadecyl-cytidine-3'-phosphate
  modified_base 7: mod_base = OTHER; note = 2'-deoxy-2'-fluoroadenosine-3'-phosphate
  modified_base 8: mod_base = OTHER; note = 2'-O-methyladenosine-3'-phosphate
  modified_base 9: mod_base = OTHER; note = 2'-deoxy-2'-fluoroadenosine-3'-phosphate
  modified_base 10: mod_base = OTHER; note = 2'-deoxy-2'-fluoroguanosine-3'-phosphate
  modified_base 11: mod_base = OTHER; note = 2'-deoxy-2'-fluoroguanosine-3'-phosphate
  modified_base 12: mod_base = OTHER; note = 2'-O-methyluridine-3'-phosphate
  modified_base 13: mod_base = OTHER; note = 2'-O-methylguanosine-3'-phosphate
  modified_base 14: mod_base = OTHER; note = 2'-O-methylguanosine-3'-phosphate
  modified_base 15: mod_base = OTHER; note = 2'-O-methyladenosine-3'-phosphate
  modified_base 16: mod_base = OTHER; note = 2'-O-methyladenosine-3'-phosphate
  modified_base 17: mod_base = OTHER; note = 2'-O-methyladenosine-3'-phosphate
  modified_base 18: mod_base = OTHER; note = 2'-O-methyluridine-3'-phosphate
  modified_base 19: mod_base = OTHER; note = 2'-O-methylguanosine-3'-phosphorothioate
  modified_base 20: mod_base = OTHER; note = 2'-O-methyladenosine-3'-phosphorothioate
  modified_base 21: mod_base = OTHER; note = 2'-O-methyladenosine
ttgggcaaaggtggaaatgaa

SEQ ID NO: 265 - RNA, 23 nt, synthetic construct
  source 1..23: mol_type = other RNA
  modified_base 1: mod_base = OTHER; note = 2'-O-methyluridine-3'-phosphorothioate 5'-(cis-5-(4-bromophenyl)-3,3-dimethyl-1,2-dithiolan-4-yl thiophosphate)
  modified_base 2: mod_base = OTHER; note = 2'-deoxy-2'-fluorouridine-3'-phosphorothioate
  modified_base 3: mod_base = OTHER; note = 2'-O-methylcytidine-3'-phosphate
  modified_base 4: mod_base = OTHER; note = 2'-O-methyladenosine-3'-phosphate
  modified_base 5: mod_base = OTHER; note = 2'-O-methyluridine-3'-phosphate
  modified_base 6: mod_base = OTHER; note = 2'-deoxy-2'-fluorouridine-3'-phosphate
  modified_base 7: mod_base = OTHER; note = 2'-O-methyluridine-3'-phosphate
  modified_base 8: mod_base = OTHER; note = 2'-deoxy-2'-fluorocytidine-3'-phosphate
  modified_base 9: mod_base = OTHER; note = 2'-deoxy-2'-fluorocytidine-3'-phosphate
  modified_base 10: mod_base = OTHER; note = 2'-O-methyladenosine-3'-phosphate
  modified_base 11: mod_base = OTHER; note = 2'-O-methylcytidine-3'-phosphate
  modified_base 12: mod_base = OTHER; note = 2'-O-methylcytidine-3'-phosphate
  modified_base 13: mod_base = OTHER; note = 2'-O-methyluridine-3'-phosphate
  modified_base 14: mod_base = OTHER; note = 2'-deoxy-2'-fluorouridine-3'-phosphate
  modified_base 15: mod_base = OTHER; note = 2'-O-methyluridine-3'-phosphate
  modified_base 16: mod_base = OTHER; note = 2'-deoxy-2'-fluoroguanosine-3'-phosphate
  modified_base 17: mod_base = OTHER; note = 2'-O-methylcytidine-3'-phosphate
  modified_base 18: mod_base = OTHER; note = 2'-O-methylcytidine-3'-phosphate
  modified_base 19: mod_base = OTHER; note = 2'-O-methylcytidine-3'-phosphate
  modified_base 20: mod_base = OTHER; note = 2'-O-methyladenosine-3'-phosphate
  modified_base 21: mod_base = OTHER; note = 2'-O-methyladenosine-3'-phosphorothioate
  modified_base 22: mod_base = OTHER; note = 2'-O-methylguanosine-3'-phosphorothioate
  modified_base 23: mod_base = OTHER; note = 2'-O-methylcytidine
ttcatttccacctttgcccaagc

SEQ ID NO: 266 - RNA, 21 nt, synthetic construct
  source 1..21: mol_type = other RNA
  modified_base 1: mod_base = OTHER; note = 2'-O-methyluridine-3'-phosphorothioate
  modified_base 2: mod_base = OTHER; note = 2'-O-methyluridine-3'-phosphorothioate
  modified_base 3: mod_base = OTHER; note = 2'-O-methylguanosine-3'-phosphate
  modified_base 4: mod_base = OTHER; note = 2'-O-methylguanosine-3'-phosphate
  modified_base 5: mod_base = OTHER; note = 2'-O-methylguanosine-3'-phosphate
  modified_base 6: mod_base = OTHER; note = 2'-O-hexadecyl-cytidine-3'-phosphate
  modified_base 7: mod_base = OTHER; note = 2'-deoxy-2'-fluoroadenosine-3'-phosphate
  modified_base 8: mod_base = OTHER; note = 2'-O-methyladenosine-3'-phosphate
  modified_base 9: mod_base = OTHER; note = 2'-deoxy-2'-fluoroadenosine-3'-phosphate
  modified_base 10: mod_base = OTHER; note = 2'-deoxy-2'-fluoroguanosine-3'-phosphate
  modified_base 11: mod_base = OTHER; note = 2'-deoxy-2'-fluoroguanosine-3'-phosphate
  modified_base 12: mod_base = OTHER; note = 2'-O-methyluridine-3'-phosphate
  modified_base 13: mod_base = OTHER; note = 2'-O-methylguanosine-3'-phosphate
  modified_base 14: mod_base = OTHER; note = 2'-O-methylguanosine-3'-phosphate
  modified_base 15: mod_base = OTHER; note = 2'-O-methyladenosine-3'-phosphate
  modified_base 16: mod_base = OTHER; note = 2'-O-methyladenosine-3'-phosphate
  modified_base 17: mod_base = OTHER; note = 2'-O-methyladenosine-3'-phosphate
  modified_base 18: mod_base = OTHER; note = 2'-O-methyluridine-3'-phosphate
  modified_base 19: mod_base = OTHER; note = 2'-O-methylguanosine-3'-phosphorothioate
  modified_base 20: mod_base = OTHER; note = 2'-O-methyladenosine-3'-phosphorothioate
  modified_base 21: mod_base = OTHER; note = 2'-O-methyladenosine
ttgggcaaaggtggaaatgaa

SEQ ID NO: 267 - RNA, 23 nt, synthetic construct
  source 1..23: mol_type = other RNA
  modified_base 1: mod_base = OTHER; note = 2'-O-methyluridine-3'-phosphorothioate 5'-(cis-5-(4-cyanophenyl)-3,3-dimethyl-1,2-dithiolan-4-yl thiophosphate)
  modified_base 2: mod_base = OTHER; note = 2'-deoxy-2'-fluorouridine-3'-phosphorothioate
  modified_base 3: mod_base = OTHER; note = 2'-O-methylcytidine-3'-phosphate
  modified_base 4: mod_base = OTHER; note = 2'-O-methyladenosine-3'-phosphate
  modified_base 5: mod_base = OTHER; note = 2'-O-methyluridine-3'-phosphate
  modified_base 6: mod_base = OTHER; note = 2'-deoxy-2'-fluorouridine-3'-phosphate
  modified_base 7: mod_base = OTHER; note = 2'-O-methyluridine-3'-phosphate
  modified_base 8: mod_base = OTHER; note = 2'-deoxy-2'-fluorocytidine-3'-phosphate
  modified_base 9: mod_base = OTHER; note = 2'-deoxy-2'-fluorocytidine-3'-phosphate
  modified_base 10: mod_base = OTHER; note = 2'-O-methyladenosine-3'-phosphate
  modified_base 11: mod_base = OTHER; note = 2'-O-methylcytidine-3'-phosphate
  modified_base 12: mod_base = OTHER; note = 2'-O-methylcytidine-3'-phosphate
  modified_base 13: mod_base = OTHER; note = 2'-O-methyluridine-3'-phosphate
  modified_base 14: mod_base = OTHER; note = 2'-deoxy-2'-fluorouridine-3'-phosphate
  modified_base 15: mod_base = OTHER; note = 2'-O-methyluridine-3'-phosphate
  modified_base 16: mod_base = OTHER; note = 2'-deoxy-2'-fluoroguanosine-3'-phosphate
  modified_base 17: mod_base = OTHER; note = 2'-O-methylcytidine-3'-phosphate
  modified_base 18: mod_base = OTHER; note = 2'-O-methylcytidine-3'-phosphate
  modified_base 19: mod_base = OTHER; note = 2'-O-methylcytidine-3'-phosphate
  modified_base 20: mod_base = OTHER; note = 2'-O-methyladenosine-3'-phosphate
  modified_base 21: mod_base = OTHER; note = 2'-O-methyladenosine-3'-phosphorothioate
  modified_base 22: mod_base = OTHER; note = 2'-O-methylguanosine-3'-phosphorothioate
  modified_base 23: mod_base = OTHER; note = 2'-O-methylcytidine
ttcatttccacctttgcccaagc

SEQ ID NO: 268 - RNA, 21 nt, synthetic construct
  source 1..21: mol_type = other RNA
  modified_base 1: mod_base = OTHER; note = 2'-O-methyluridine-3'-phosphorothioate
  modified_base 2: mod_base = OTHER; note = 2'-O-methyluridine-3'-phosphorothioate
  modified_base 3: mod_base = OTHER; note = 2'-O-methylguanosine-3'-phosphate
  modified_base 4: mod_base = OTHER; note = 2'-O-methylguanosine-3'-phosphate
  modified_base 5: mod_base = OTHER; note = 2'-O-methylguanosine-3'-phosphate
  modified_base 6: mod_base = OTHER; note = 2'-O-hexadecyl-cytidine-3'-phosphate
  modified_base 7: mod_base = OTHER; note = 2'-deoxy-2'-fluoroadenosine-3'-phosphate
  modified_base 8: mod_base = OTHER; note = 2'-O-methyladenosine-3'-phosphate
  modified_base 9: mod_base = OTHER; note = 2'-deoxy-2'-fluoroadenosine-3'-phosphate
  modified_base 10: mod_base = OTHER; note = 2'-deoxy-2'-fluoroguanosine-3'-phosphate
  modified_base 11: mod_base = OTHER; note = 2'-deoxy-2'-fluoroguanosine-3'-phosphate
  modified_base 12: mod_base = OTHER; note = 2'-O-methyluridine-3'-phosphate
  modified_base 13: mod_base = OTHER; note = 2'-O-methylguanosine-3'-phosphate
  modified_base 14: mod_base = OTHER; note = 2'-O-methylguanosine-3'-phosphate
  modified_base 15: mod_base = OTHER; note = 2'-O-methyladenosine-3'-phosphate
  modified_base 16: mod_base = OTHER; note = 2'-O-methyladenosine-3'-phosphate
  modified_base 17: mod_base = OTHER; note = 2'-O-methyladenosine-3'-phosphate
  modified_base 18: mod_base = OTHER; note = 2'-O-methyluridine-3'-phosphate
  modified_base 19: mod_base = OTHER; note = 2'-O-methylguanosine-3'-phosphorothioate
  modified_base 20: mod_base = OTHER; note = 2'-O-methyladenosine-3'-phosphorothioate
  modified_base 21: mod_base = OTHER; note = 2'-O-methyladenosine
ttgggcaaaggtggaaatgaa

SEQ ID NO: 269 - RNA, 23 nt, synthetic construct
  source 1..23: mol_type = other RNA
  modified_base 1: mod_base = OTHER; note = 2'-O-methyluridine-3'-phosphorothioate 5'-(cis-5-(4-fluorophenyl)-3,3-dimethyl-1,2-dithiolan-4-yl thiophosphate)
  modified_base 2: mod_base = OTHER; note = 2'-deoxy-2'-fluorouridine-3'-phosphorothioate
  modified_base 3: mod_base = OTHER; note = 2'-O-methylcytidine-3'-phosphate
  modified_base 4: mod_base = OTHER; note = 2'-O-methyladenosine-3'-phosphate
  modified_base 5: mod_base = OTHER; note = 2'-O-methyluridine-3'-phosphate
  modified_base 6: mod_base = OTHER; note = 2'-deoxy-2'-fluorouridine-3'-phosphate
  modified_base 7: mod_base = OTHER; note = 2'-O-methyluridine-3'-phosphate
  modified_base 8: mod_base = OTHER; note = 2'-deoxy-2'-fluorocytidine-3'-phosphate
  modified_base 9: mod_base = OTHER; note = 2'-deoxy-2'-fluorocytidine-3'-phosphate
  modified_base 10: mod_base = OTHER; note = 2'-O-methyladenosine-3'-phosphate
  modified_base 11: mod_base = OTHER; note = 2'-O-methylcytidine-3'-phosphate
  modified_base 12: mod_base = OTHER; note = 2'-O-methylcytidine-3'-phosphate
  modified_base 13: mod_base = OTHER; note = 2'-O-methyluridine-3'-phosphate
  modified_base 14: mod_base = OTHER; note = 2'-deoxy-2'-fluorouridine-3'-phosphate
  modified_base 15: mod_base = OTHER; note = 2'-O-methyluridine-3'-phosphate
  modified_base 16: mod_base = OTHER; note = 2'-deoxy-2'-fluoroguanosine-3'-phosphate
  modified_base 17: mod_base = OTHER; note = 2'-O-methylcytidine-3'-phosphate
  modified_base 18: mod_base = OTHER; note = 2'-O-methylcytidine-3'-phosphate
  modified_base 19: mod_base = OTHER; note = 2'-O-methylcytidine-3'-phosphate
  modified_base 20: mod_base = OTHER; note = 2'-O-methyladenosine-3'-phosphate
  modified_base 21: mod_base = OTHER; note = 2'-O-methyladenosine-3'-phosphorothioate
  modified_base 22: mod_base = OTHER; note = 2'-O-methylguanosine-3'-phosphorothioate
  modified_base 23: mod_base = OTHER; note = 2'-O-methylcytidine
ttcatttccacctttgcccaagc

SEQ ID NO: 270 - RNA, 21 nt, synthetic construct
  source 1..21: mol_type = other RNA
  modified_base 1: mod_base = OTHER; note = 2'-O-methyluridine-3'-phosphorothioate
  modified_base 2: mod_base = OTHER; note = 2'-O-methyluridine-3'-phosphorothioate
  modified_base 3: mod_base = OTHER; note = 2'-O-methylguanosine-3'-phosphate
  modified_base 4: mod_base = OTHER; note = 2'-O-methylguanosine-3'-phosphate
  modified_base 5: mod_base = OTHER; note = 2'-O-methylguanosine-3'-phosphate
  modified_base 6: mod_base = OTHER; note = 2'-O-hexadecyl-cytidine-3'-phosphate
  modified_base 7: mod_base = OTHER; note = 2'-deoxy-2'-fluoroadenosine-3'-phosphate
  modified_base 8: mod_base = OTHER; note = 2'-O-methyladenosine-3'-phosphate
  modified_base 9: mod_base = OTHER; note = 2'-deoxy-2'-fluoroadenosine-3'-phosphate
  modified_base 10: mod_base = OTHER; note = 2'-deoxy-2'-fluoroguanosine-3'-phosphate
  modified_base 11: mod_base = OTHER; note = 2'-deoxy-2'-fluoroguanosine-3'-phosphate
  modified_base 12: mod_base = OTHER; note = 2'-O-methyluridine-3'-phosphate
  modified_base 13: mod_base = OTHER; note = 2'-O-methylguanosine-3'-phosphate
  modified_base 14: mod_base = OTHER; note = 2'-O-methylguanosine-3'-phosphate
  modified_base 15: mod_base = OTHER; note = 2'-O-methyladenosine-3'-phosphate
  modified_base 16: mod_base = OTHER; note = 2'-O-methyladenosine-3'-phosphate
  modified_base 17: mod_base = OTHER; note = 2'-O-methyladenosine-3'-phosphate
  modified_base 18: mod_base = OTHER; note = 2'-O-methyluridine-3'-phosphate
  modified_base 19: mod_base = OTHER; note = 2'-O-methylguanosine-3'-phosphorothioate
  modified_base 20: mod_base = OTHER; note = 2'-O-methyladenosine-3'-phosphorothioate
  modified_base 21: mod_base = OTHER; note = 2'-O-methyladenosine
ttgggcaaaggtggaaatgaa

SEQ ID NO: 271 - RNA, 23 nt, synthetic construct
  source 1..23: mol_type = other RNA
  modified_base 1: mod_base = OTHER; note = 2'-O-methyluridine-3'-phosphorothioate 5'-(cis-5-(benzo[1,3]dioxol-6-yl)-3,3-dimethyl-1,2-dithiola n-4-yl thiophosphate)
  modified_base 2: mod_base = OTHER; note = 2'-deoxy-2'-fluorouridine-3'-phosphorothioate
  modified_base 3: mod_base = OTHER; note = 2'-O-methylcytidine-3'-phosphate
  modified_base 4: mod_base = OTHER; note = 2'-O-methyladenosine-3'-phosphate
  modified_base 5: mod_base = OTHER; note = 2'-O-methyluridine-3'-phosphate
  modified_base 6: mod_base = OTHER; note = 2'-deoxy-2'-fluorouridine-3'-phosphate
  modified_base 7: mod_base = OTHER; note = 2'-O-methyluridine-3'-phosphate
  modified_base 8: mod_base = OTHER; note = 2'-deoxy-2'-fluorocytidine-3'-phosphate
  modified_base 9: mod_base = OTHER; note = 2'-deoxy-2'-fluorocytidine-3'-phosphate
  modified_base 10: mod_base = OTHER; note = 2'-O-methyladenosine-3'-phosphate
  modified_base 11: mod_base = OTHER; note = 2'-O-methylcytidine-3'-phosphate
  modified_base 12: mod_base = OTHER; note = 2'-O-methylcytidine-3'-phosphate
  modified_base 13: mod_base = OTHER; note = 2'-O-methyluridine-3'-phosphate
  modified_base 14: mod_base = OTHER; note = 2'-deoxy-2'-fluorouridine-3'-phosphate
  modified_base 15: mod_base = OTHER; note = 2'-O-methyluridine-3'-phosphate
  modified_base 16: mod_base = OTHER; note = 2'-deoxy-2'-fluoroguanosine-3'-phosphate
  modified_base 17: mod_base = OTHER; note = 2'-O-methylcytidine-3'-phosphate
  modified_base 18: mod_base = OTHER; note = 2'-O-methylcytidine-3'-phosphate
  modified_base 19: mod_base = OTHER; note = 2'-O-methylcytidine-3'-phosphate
  modified_base 20: mod_base = OTHER; note = 2'-O-methyladenosine-3'-phosphate
  modified_base 21: mod_base = OTHER; note = 2'-O-methyladenosine-3'-phosphorothioate
  modified_base 22: mod_base = OTHER; note = 2'-O-methylguanosine-3'-phosphorothioate
  modified_base 23: mod_base = OTHER; note = 2'-O-methylcytidine
ttcatttccacctttgcccaagc

SEQ ID NO: 272 - RNA, 21 nt, synthetic construct
  source 1..21: mol_type = other RNA
  modified_base 1: mod_base = OTHER; note = 2'-O-methyluridine-3'-phosphorothioate
  modified_base 2: mod_base = OTHER; note = 2'-O-methyluridine-3'-phosphorothioate
  modified_base 3: mod_base = OTHER; note = 2'-O-methylguanosine-3'-phosphate
  modified_base 4: mod_base = OTHER; note = 2'-O-methylguanosine-3'-phosphate
  modified_base 5: mod_base = OTHER; note = 2'-O-methylguanosine-3'-phosphate
  modified_base 6: mod_base = OTHER; note = 2'-O-hexadecyl-cytidine-3'-phosphate
  modified_base 7: mod_base = OTHER; note = 2'-deoxy-2'-fluoroadenosine-3'-phosphate
  modified_base 8: mod_base = OTHER; note = 2'-O-methyladenosine-3'-phosphate
  modified_base 9: mod_base = OTHER; note = 2'-deoxy-2'-fluoroadenosine-3'-phosphate
  modified_base 10: mod_base = OTHER; note = 2'-deoxy-2'-fluoroguanosine-3'-phosphate
  modified_base 11: mod_base = OTHER; note = 2'-deoxy-2'-fluoroguanosine-3'-phosphate
  modified_base 12: mod_base = OTHER; note = 2'-O-methyluridine-3'-phosphate
  modified_base 13: mod_base = OTHER; note = 2'-O-methylguanosine-3'-phosphate
  modified_base 14: mod_base = OTHER; note = 2'-O-methylguanosine-3'-phosphate
  modified_base 15: mod_base = OTHER; note = 2'-O-methyladenosine-3'-phosphate
  modified_base 16: mod_base = OTHER; note = 2'-O-methyladenosine-3'-phosphate
  modified_base 17: mod_base = OTHER; note = 2'-O-methyladenosine-3'-phosphate
  modified_base 18: mod_base = OTHER; note = 2'-O-methyluridine-3'-phosphate
  modified_base 19: mod_base = OTHER; note = 2'-O-methylguanosine-3'-phosphorothioate
  modified_base 20: mod_base = OTHER; note = 2'-O-methyladenosine-3'-phosphorothioate
  modified_base 21: mod_base = OTHER; note = 2'-O-methyladenosine
ttgggcaaaggtggaaatgaa

SEQ ID NO: 273 - RNA, 23 nt, synthetic construct
  source 1..23: mol_type = other RNA
  modified_base 1: mod_base = OTHER; note = 2'-O-methyluridine-3'-phosphorothioate 5'-(cis-5-(2-methylphenyl)-3,3-dimethyl-1,2-dithiolan-4-yl thiophosphate)
  modified_base 2: mod_base = OTHER; note = 2'-deoxy-2'-fluorouridine-3'-phosphorothioate
  modified_base 3: mod_base = OTHER; note = 2'-O-methylcytidine-3'-phosphate
  modified_base 4: mod_base = OTHER; note = 2'-O-methyladenosine-3'-phosphate
  modified_base 5: mod_base = OTHER; note = 2'-O-methyluridine-3'-phosphate
  modified_base 6: mod_base = OTHER; note = 2'-deoxy-2'-fluorouridine-3'-phosphate
  modified_base 7: mod_base = OTHER; note = 2'-O-methyluridine-3'-phosphate
  modified_base 8: mod_base = OTHER; note = 2'-deoxy-2'-fluorocytidine-3'-phosphate
  modified_base 9: mod_base = OTHER; note = 2'-deoxy-2'-fluorocytidine-3'-phosphate
  modified_base 10: mod_base = OTHER; note = 2'-O-methyladenosine-3'-phosphate
  modified_base 11: mod_base = OTHER; note = 2'-O-methylcytidine-3'-phosphate
  modified_base 12: mod_base = OTHER; note = 2'-O-methylcytidine-3'-phosphate
  modified_base 13: mod_base = OTHER; note = 2'-O-methyluridine-3'-phosphate
  modified_base 14: mod_base = OTHER; note = 2'-deoxy-2'-fluorouridine-3'-phosphate
  modified_base 15: mod_base = OTHER; note = 2'-O-methyluridine-3'-phosphate
  modified_base 16: mod_base = OTHER; note = 2'-deoxy-2'-fluoroguanosine-3'-phosphate
  modified_base 17: mod_base = OTHER; note = 2'-O-methylcytidine-3'-phosphate
  modified_base 18: mod_base = OTHER; note = 2'-O-methylcytidine-3'-phosphate
  modified_base 19: mod_base = OTHER; note = 2'-O-methylcytidine-3'-phosphate
  modified_base 20: mod_base = OTHER; note = 2'-O-methyladenosine-3'-phosphate
  modified_base 21: mod_base = OTHER; note = 2'-O-methyladenosine-3'-phosphorothioate
  modified_base 22: mod_base = OTHER; note = 2'-O-methylguanosine-3'-phosphorothioate
  modified_base 23: mod_base = OTHER; note = 2'-O-methylcytidine
ttcatttccacctttgcccaagc

SEQ ID NO: 274 - RNA, 21 nt, synthetic construct
  source 1..21: mol_type = other RNA
  modified_base 1: mod_base = OTHER; note = 2'-O-methyluridine-3'-phosphorothioate
  modified_base 2: mod_base = OTHER; note = 2'-O-methyluridine-3'-phosphorothioate
  modified_base 3: mod_base = OTHER; note = 2'-O-methylguanosine-3'-phosphate
  modified_base 4: mod_base = OTHER; note = 2'-O-methylguanosine-3'-phosphate
  modified_base 5: mod_base = OTHER; note = 2'-O-methylguanosine-3'-phosphate
  modified_base 6: mod_base = OTHER; note = 2'-O-hexadecyl-cytidine-3'-phosphate
  modified_base 7: mod_base = OTHER; note = 2'-deoxy-2'-fluoroadenosine-3'-phosphate
  modified_base 8: mod_base = OTHER; note = 2'-O-methyladenosine-3'-phosphate
  modified_base 9: mod_base = OTHER; note = 2'-deoxy-2'-fluoroadenosine-3'-phosphate
  modified_base 10: mod_base = OTHER; note = 2'-deoxy-2'-fluoroguanosine-3'-phosphate
  modified_base 11: mod_base = OTHER; note = 2'-deoxy-2'-fluoroguanosine-3'-phosphate
  modified_base 12: mod_base = OTHER; note = 2'-O-methyluridine-3'-phosphate
  modified_base 13: mod_base = OTHER; note = 2'-O-methylguanosine-3'-phosphate
  modified_base 14: mod_base = OTHER; note = 2'-O-methylguanosine-3'-phosphate
  modified_base 15: mod_base = OTHER; note = 2'-O-methyladenosine-3'-phosphate
  modified_base 16: mod_base = OTHER; note = 2'-O-methyladenosine-3'-phosphate
  modified_base 17: mod_base = OTHER; note = 2'-O-methyladenosine-3'-phosphate
  modified_base 18: mod_base = OTHER; note = 2'-O-methyluridine-3'-phosphate
  modified_base 19: mod_base = OTHER; note = 2'-O-methylguanosine-3'-phosphorothioate
  modified_base 20: mod_base = OTHER; note = 2'-O-methyladenosine-3'-phosphorothioate
  modified_base 21: mod_base = OTHER; note = 2'-O-methyladenosine
ttgggcaaaggtggaaatgaa

SEQ ID NO: 275 - RNA, 23 nt, synthetic construct
  source 1..23: mol_type = other RNA
  modified_base 1: mod_base = OTHER; note = 2'-O-methyluridine-3'-phosphorothioate 5'-(cis-5-(2-methoxyphenyl)-3,3-dimethyl-1,2-dithiolan-4-yl thiophosphate)
  modified_base 2: mod_base = OTHER; note = 2'-deoxy-2'-fluorouridine-3'-phosphorothioate
  modified_base 3: mod_base = OTHER; note = 2'-O-methylcytidine-3'-phosphate
  modified_base 4: mod_base = OTHER; note = 2'-O-methyladenosine-3'-phosphate
  modified_base 5: mod_base = OTHER; note = 2'-O-methyluridine-3'-phosphate
  modified_base 6: mod_base = OTHER; note = 2'-deoxy-2'-fluorouridine-3'-phosphate
  modified_base 7: mod_base = OTHER; note = 2'-O-methyluridine-3'-phosphate
  modified_base 8: mod_base = OTHER; note = 2'-deoxy-2'-fluorocytidine-3'-phosphate
  modified_base 9: mod_base = OTHER; note = 2'-deoxy-2'-fluorocytidine-3'-phosphate
  modified_base 10: mod_base = OTHER; note = 2'-O-methyladenosine-3'-phosphate
  modified_base 11: mod_base = OTHER; note = 2'-O-methylcytidine-3'-phosphate
  modified_base 12: mod_base = OTHER; note = 2'-O-methylcytidine-3'-phosphate
  modified_base 13: mod_base = OTHER; note = 2'-O-methyluridine-3'-phosphate
  modified_base 14: mod_base = OTHER; note = 2'-deoxy-2'-fluorouridine-3'-phosphate
  modified_base 15: mod_base = OTHER; note = 2'-O-methyluridine-3'-phosphate
  modified_base 16: mod_base = OTHER; note = 2'-deoxy-2'-fluoroguanosine-3'-phosphate
  modified_base 17: mod_base = OTHER; note = 2'-O-methylcytidine-3'-phosphate
  modified_base 18: mod_base = OTHER; note = 2'-O-methylcytidine-3'-phosphate
  modified_base 19: mod_base = OTHER; note = 2'-O-methylcytidine-3'-phosphate
  modified_base 20: mod_base = OTHER; note = 2'-O-methyladenosine-3'-phosphate
  modified_base 21: mod_base = OTHER; note = 2'-O-methyladenosine-3'-phosphorothioate
  modified_base 22: mod_base = OTHER; note = 2'-O-methylguanosine-3'-phosphorothioate
  modified_base 23: mod_base = OTHER; note = 2'-O-methylcytidine
ttcatttccacctttgcccaagc

SEQ ID NO: 276 - RNA, 21 nt, synthetic construct
  source 1..21: mol_type = other RNA
  modified_base 1: mod_base = OTHER; note = 2'-O-methyluridine-3'-phosphorothioate
  modified_base 2: mod_base = OTHER; note = 2'-O-methyluridine-3'-phosphorothioate
  modified_base 3: mod_base = OTHER; note = 2'-O-methylguanosine-3'-phosphate
  modified_base 4: mod_base = OTHER; note = 2'-O-methylguanosine-3'-phosphate
  modified_base 5: mod_base = OTHER; note = 2'-O-methylguanosine-3'-phosphate
  modified_base 6: mod_base = OTHER; note = 2'-O-hexadecyl-cytidine-3'-phosphate
  modified_base 7: mod_base = OTHER; note = 2'-deoxy-2'-fluoroadenosine-3'-phosphate
  modified_base 8: mod_base = OTHER; note = 2'-O-methyladenosine-3'-phosphate
  modified_base 9: mod_base = OTHER; note = 2'-deoxy-2'-fluoroadenosine-3'-phosphate
  modified_base 10: mod_base = OTHER; note = 2'-deoxy-2'-fluoroguanosine-3'-phosphate
  modified_base 11: mod_base = OTHER; note = 2'-deoxy-2'-fluoroguanosine-3'-phosphate
  modified_base 12: mod_base = OTHER; note = 2'-O-methyluridine-3'-phosphate
  modified_base 13: mod_base = OTHER; note = 2'-O-methylguanosine-3'-phosphate
  modified_base 14: mod_base = OTHER; note = 2'-O-methylguanosine-3'-phosphate
  modified_base 15: mod_base = OTHER; note = 2'-O-methyladenosine-3'-phosphate
  modified_base 16: mod_base = OTHER; note = 2'-O-methyladenosine-3'-phosphate
  modified_base 17: mod_base = OTHER; note = 2'-O-methyladenosine-3'-phosphate
  modified_base 18: mod_base = OTHER; note = 2'-O-methyluridine-3'-phosphate
  modified_base 19: mod_base = OTHER; note = 2'-O-methylguanosine-3'-phosphorothioate
  modified_base 20: mod_base = OTHER; note = 2'-O-methyladenosine-3'-phosphorothioate
  modified_base 21: mod_base = OTHER; note = 2'-O-methyladenosine
ttgggcaaaggtggaaatgaa

SEQ ID NO: 277 - RNA, 23 nt, synthetic construct
  source 1..23: mol_type = other RNA
  modified_base 1: mod_base = OTHER; note = 2'-O-methyluridine-3'-phosphorothioate 5'-((cis-3,3,5-trimethyl-1,2-dithiolan-4-yl) (1,3-dimethylimidazolidin-2-ylidene)phosphoramidate)
  modified_base 2: mod_base = OTHER; note = 2'-deoxy-2'-fluorouridine-3'-phosphorothioate
  modified_base 3: mod_base = OTHER; note = 2'-O-methylcytidine-3'-phosphate
  modified_base 4: mod_base = OTHER; note = 2'-O-methyladenosine-3'-phosphate
  modified_base 5: mod_base = OTHER; note = 2'-O-methyluridine-3'-phosphate
  modified_base 6: mod_base = OTHER; note = 2'-deoxy-2'-fluorouridine-3'-phosphate
  modified_base 7: mod_base = OTHER; note = 2'-O-methyluridine-3'-phosphate
  modified_base 8: mod_base = OTHER; note = 2'-deoxy-2'-fluorocytidine-3'-phosphate
  modified_base 9: mod_base = OTHER; note = 2'-deoxy-2'-fluorocytidine-3'-phosphate
  modified_base 10: mod_base = OTHER; note = 2'-O-methyladenosine-3'-phosphate
  modified_base 11: mod_base = OTHER; note = 2'-O-methylcytidine-3'-phosphate
  modified_base 12: mod_base = OTHER; note = 2'-O-methylcytidine-3'-phosphate
  modified_base 13: mod_base = OTHER; note = 2'-O-methyluridine-3'-phosphate
  modified_base 14: mod_base = OTHER; note = 2'-deoxy-2'-fluorouridine-3'-phosphate
  modified_base 15: mod_base = OTHER; note = 2'-O-methyluridine-3'-phosphate
  modified_base 16: mod_base = OTHER; note = 2'-deoxy-2'-fluoroguanosine-3'-phosphate
  modified_base 17: mod_base = OTHER; note = 2'-O-methylcytidine-3'-phosphate
  modified_base 18: mod_base = OTHER; note = 2'-O-methylcytidine-3'-phosphate
  modified_base 19: mod_base = OTHER; note = 2'-O-methylcytidine-3'-phosphate
  modified_base 20: mod_base = OTHER; note = 2'-O-methyladenosine-3'-phosphate
  modified_base 21: mod_base = OTHER; note = 2'-O-methyladenosine-3'-phosphorothioate
  modified_base 22: mod_base = OTHER; note = 2'-O-methylguanosine-3'-phosphorothioate
  modified_base 23: mod_base = OTHER; note = 2'-O-methylcytidine
ttcatttccacctttgcccaagc

SEQ ID NO: 278 - RNA, 21 nt, synthetic construct
  source 1..21: mol_type = other RNA
  modified_base 1: mod_base = OTHER; note = 2'-O-methyluridine-3'-phosphorothioate
  modified_base 2: mod_base = OTHER; note = 2'-O-methyluridine-3'-phosphorothioate
  modified_base 3: mod_base = OTHER; note = 2'-O-methylguanosine-3'-phosphate
  modified_base 4: mod_base = OTHER; note = 2'-O-methylguanosine-3'-phosphate
  modified_base 5: mod_base = OTHER; note = 2'-O-methylguanosine-3'-phosphate
  modified_base 6: mod_base = OTHER; note = 2'-O-hexadecyl-cytidine-3'-phosphate
  modified_base 7: mod_base = OTHER; note = 2'-deoxy-2'-fluoroadenosine-3'-phosphate
  modified_base 8: mod_base = OTHER; note = 2'-O-methyladenosine-3'-phosphate
  modified_base 9: mod_base = OTHER; note = 2'-deoxy-2'-fluoroadenosine-3'-phosphate
  modified_base 10: mod_base = OTHER; note = 2'-deoxy-2'-fluoroguanosine-3'-phosphate
  modified_base 11: mod_base = OTHER; note = 2'-deoxy-2'-fluoroguanosine-3'-phosphate
  modified_base 12: mod_base = OTHER; note = 2'-O-methyluridine-3'-phosphate
  modified_base 13: mod_base = OTHER; note = 2'-O-methylguanosine-3'-phosphate
  modified_base 14: mod_base = OTHER; note = 2'-O-methylguanosine-3'-phosphate
  modified_base 15: mod_base = OTHER; note = 2'-O-methyladenosine-3'-phosphate
  modified_base 16: mod_base = OTHER; note = 2'-O-methyladenosine-3'-phosphate
  modified_base 17: mod_base = OTHER; note = 2'-O-methyladenosine-3'-phosphate
  modified_base 18: mod_base = OTHER; note = 2'-O-methyluridine-3'-phosphate
  modified_base 19: mod_base = OTHER; note = 2'-O-methylguanosine-3'-phosphorothioate
  modified_base 20: mod_base = OTHER; note = 2'-O-methyladenosine-3'-phosphorothioate
  modified_base 21: mod_base = OTHER; note = 2'-O-methyladenosine
ttgggcaaaggtggaaatgaa

SEQ ID NO: 279 - RNA, 23 nt, synthetic construct
  source 1..23: mol_type = other RNA
  modified_base 1: mod_base = OTHER; note = 2'-O-methyluridine-3'-phosphorothioate 5'-((cis-3,3,5-trimethyl-1,2-dithiolan-4-yl) (N-methylsulfonyl) phosphimidate)
  modified_base 2: mod_base = OTHER; note = 2'-deoxy-2'-fluorouridine-3'-phosphorothioate
  modified_base 3: mod_base = OTHER; note = 2'-O-methylcytidine-3'-phosphate
  modified_base 4: mod_base = OTHER; note = 2'-O-methyladenosine-3'-phosphate
  modified_base 5: mod_base = OTHER; note = 2'-O-methyluridine-3'-phosphate
  modified_base 6: mod_base = OTHER; note = 2'-deoxy-2'-fluorouridine-3'-phosphate
  modified_base 7: mod_base = OTHER; note = 2'-O-methyluridine-3'-phosphate
  modified_base 8: mod_base = OTHER; note = 2'-deoxy-2'-fluorocytidine-3'-phosphate
  modified_base 9: mod_base = OTHER; note = 2'-deoxy-2'-fluorocytidine-3'-phosphate
  modified_base 10: mod_base = OTHER; note = 2'-O-methyladenosine-3'-phosphate
  modified_base 11: mod_base = OTHER; note = 2'-O-methylcytidine-3'-phosphate
  modified_base 12: mod_base = OTHER; note = 2'-O-methylcytidine-3'-phosphate
  modified_base 13: mod_base = OTHER; note = 2'-O-methyluridine-3'-phosphate
  modified_base 14: mod_base = OTHER; note = 2'-deoxy-2'-fluorouridine-3'-phosphate
  modified_base 15: mod_base = OTHER; note = 2'-O-methyluridine-3'-phosphate
  modified_base 16: mod_base = OTHER; note = 2'-deoxy-2'-fluoroguanosine-3'-phosphate
  modified_base 17: mod_base = OTHER; note = 2'-O-methylcytidine-3'-phosphate
  modified_base 18: mod_base = OTHER; note = 2'-O-methylcytidine-3'-phosphate
  modified_base 19: mod_base = OTHER; note = 2'-O-methylcytidine-3'-phosphate
  modified_base 20: mod_base = OTHER; note = 2'-O-methyladenosine-3'-phosphate
  modified_base 21: mod_base = OTHER; note = 2'-O-methyladenosine-3'-phosphorothioate
  modified_base 22: mod_base = OTHER; note = 2'-O-methylguanosine-3'-phosphorothioate
  modified_base 23: mod_base = OTHER; note = 2'-O-methylcytidine
ttcatttccacctttgcccaagc

SEQ ID NO: 280 - RNA, 21 nt, synthetic construct
  source 1..21: mol_type = other RNA
  modified_base 1: mod_base = OTHER; note = 2'-O-methyluridine-3'-phosphorothioate
  modified_base 2: mod_base = OTHER; note = 2'-O-methyluridine-3'-phosphorothioate
  modified_base 3: mod_base = OTHER; note = 2'-O-methylguanosine-3'-phosphate
  modified_base 4: mod_base = OTHER; note = 2'-O-methylguanosine-3'-phosphate
  modified_base 5: mod_base = OTHER; note = 2'-O-methylguanosine-3'-phosphate
  modified_base 6: mod_base = OTHER; note = 2'-O-hexadecyl-cytidine-3'-phosphate
  modified_base 7: mod_base = OTHER; note = 2'-deoxy-2'-fluoroadenosine-3'-phosphate
  modified_base 8: mod_base = OTHER; note = 2'-O-methyladenosine-3'-phosphate
  modified_base 9: mod_base = OTHER; note = 2'-deoxy-2'-fluoroadenosine-3'-phosphate
  modified_base 10: mod_base = OTHER; note = 2'-deoxy-2'-fluoroguanosine-3'-phosphate
  modified_base 11: mod_base = OTHER; note = 2'-deoxy-2'-fluoroguanosine-3'-phosphate
  modified_base 12: mod_base = OTHER; note = 2'-O-methyluridine-3'-phosphate
  modified_base 13: mod_base = OTHER; note = 2'-O-methylguanosine-3'-phosphate
  modified_base 14: mod_base = OTHER; note = 2'-O-methylguanosine-3'-phosphate
  modified_base 15: mod_base = OTHER; note = 2'-O-methyladenosine-3'-phosphate
  modified_base 16: mod_base = OTHER; note = 2'-O-methyladenosine-3'-phosphate
  modified_base 17: mod_base = OTHER; note = 2'-O-methyladenosine-3'-phosphate
  modified_base 18: mod_base = OTHER; note = 2'-O-methyluridine-3'-phosphate
  modified_base 19: mod_base = OTHER; note = 2'-O-methylguanosine-3'-phosphorothioate
  modified_base 20: mod_base = OTHER; note = 2'-O-methyladenosine-3'-phosphorothioate
  modified_base 21: mod_base = OTHER; note = 2'-O-methyladenosine
ttgggcaaaggtggaaatgaa

SEQ ID NO: 281 - RNA, 23 nt, synthetic construct
  source 1..23: mol_type = other RNA
  modified_base 1: mod_base = OTHER; note = 2'-O-methyluridine-3'-phosphorothioate 5'-((cis-3,3-dimethyl-5-phenyl-1,2-dithiolan-4-yl) (1,3-dimethylimidazolidin-2-ylidene)phosphoramidate)
  modified_base 2: mod_base = OTHER; note = 2'-deoxy-2'-fluorouridine-3'-phosphorothioate
  modified_base 3: mod_base = OTHER; note = 2'-O-methylcytidine-3'-phosphate
  modified_base 4: mod_base = OTHER; note = 2'-O-methyladenosine-3'-phosphate
  modified_base 5: mod_base = OTHER; note = 2'-O-methyluridine-3'-phosphate
  modified_base 6: mod_base = OTHER; note = 2'-deoxy-2'-fluorouridine-3'-phosphate
  modified_base 7: mod_base = OTHER; note = 2'-O-methyluridine-3'-phosphate
  modified_base 8: mod_base = OTHER; note = 2'-deoxy-2'-fluorocytidine-3'-phosphate
  modified_base 9: mod_base = OTHER; note = 2'-deoxy-2'-fluorocytidine-3'-phosphate
  modified_base 10: mod_base = OTHER; note = 2'-O-methyladenosine-3'-phosphate
  modified_base 11: mod_base = OTHER; note = 2'-O-methylcytidine-3'-phosphate
  modified_base 12: mod_base = OTHER; note = 2'-O-methylcytidine-3'-phosphate
  modified_base 13: mod_base = OTHER; note = 2'-O-methyluridine-3'-phosphate
  modified_base 14: mod_base = OTHER; note = 2'-deoxy-2'-fluorouridine-3'-phosphate
  modified_base 15: mod_base = OTHER; note = 2'-O-methyluridine-3'-phosphate
  modified_base 16: mod_base = OTHER; note = 2'-deoxy-2'-fluoroguanosine-3'-phosphate
  modified_base 17: mod_base = OTHER; note = 2'-O-methylcytidine-3'-phosphate
  modified_base 18: mod_base = OTHER; note = 2'-O-methylcytidine-3'-phosphate
  modified_base 19: mod_base = OTHER; note = 2'-O-methylcytidine-3'-phosphate
  modified_base 20: mod_base = OTHER; note = 2'-O-methyladenosine-3'-phosphate
  modified_base 21: mod_base = OTHER; note = 2'-O-methyladenosine-3'-phosphorothioate
  modified_base 22: mod_base = OTHER; note = 2'-O-methylguanosine-3'-phosphorothioate
  modified_base 23: mod_base = OTHER; note = 2'-O-methylcytidine
ttcatttccacctttgcccaagc

SEQ ID NO: 282 - RNA, 21 nt, synthetic construct
  source 1..21: mol_type = other RNA
  modified_base 1: mod_base = OTHER; note = 2'-O-methyluridine-3'-phosphorothioate
  modified_base 2: mod_base = OTHER; note = 2'-O-methyluridine-3'-phosphorothioate
  modified_base 3: mod_base = OTHER; note = 2'-O-methylguanosine-3'-phosphate
  modified_base 4: mod_base = OTHER; note = 2'-O-methylguanosine-3'-phosphate
  modified_base 5: mod_base = OTHER; note = 2'-O-methylguanosine-3'-phosphate
  modified_base 6: mod_base = OTHER; note = 2'-O-hexadecyl-cytidine-3'-phosphate
  modified_base 7: mod_base = OTHER; note = 2'-deoxy-2'-fluoroadenosine-3'-phosphate
  modified_base 8: mod_base = OTHER; note = 2'-O-methyladenosine-3'-phosphate
  modified_base 9: mod_base = OTHER; note = 2'-deoxy-2'-fluoroadenosine-3'-phosphate
  modified_base 10: mod_base = OTHER; note = 2'-deoxy-2'-fluoroguanosine-3'-phosphate
  modified_base 11: mod_base = OTHER; note = 2'-deoxy-2'-fluoroguanosine-3'-phosphate
  modified_base 12: mod_base = OTHER; note = 2'-O-methyluridine-3'-phosphate
  modified_base 13: mod_base = OTHER; note = 2'-O-methylguanosine-3'-phosphate
  modified_base 14: mod_base = OTHER; note = 2'-O-methylguanosine-3'-phosphate
  modified_base 15: mod_base = OTHER; note = 2'-O-methyladenosine-3'-phosphate
  modified_base 16: mod_base = OTHER; note = 2'-O-methyladenosine-3'-phosphate
  modified_base 17: mod_base = OTHER; note = 2'-O-methyladenosine-3'-phosphate
  modified_base 18: mod_base = OTHER; note = 2'-O-methyluridine-3'-phosphate
  modified_base 19: mod_base = OTHER; note = 2'-O-methylguanosine-3'-phosphorothioate
  modified_base 20: mod_base = OTHER; note = 2'-O-methyladenosine-3'-phosphorothioate
  modified_base 21: mod_base = OTHER; note = 2'-O-methyladenosine
ttgggcaaaggtggaaatgaa

SEQ ID NO: 283 - RNA, 23 nt, synthetic construct
  source 1..23: mol_type = other RNA
  modified_base 1: mod_base = OTHER; note = 2'-O-methyluridine-3'-phosphorothioate 5'-(cis-5-phenyl-3,3-dimethyl-1,2-dithiolan-4-yl (N-methylsulfonyl) phosphimidate)
  modified_base 2: mod_base = OTHER; note = 2'-deoxy-2'-fluorouridine-3'-phosphorothioate
  modified_base 3: mod_base = OTHER; note = 2'-O-methylcytidine-3'-phosphate
  modified_base 4: mod_base = OTHER; note = 2'-O-methyladenosine-3'-phosphate
  modified_base 5: mod_base = OTHER; note = 2'-O-methyluridine-3'-phosphate
  modified_base 6: mod_base = OTHER; note = 2'-deoxy-2'-fluorouridine-3'-phosphate
  modified_base 7: mod_base = OTHER; note = 2'-O-methyluridine-3'-phosphate
  modified_base 8: mod_base = OTHER; note = 2'-deoxy-2'-fluorocytidine-3'-phosphate
  modified_base 9: mod_base = OTHER; note = 2'-deoxy-2'-fluorocytidine-3'-phosphate
  modified_base 10: mod_base = OTHER; note = 2'-O-methyladenosine-3'-phosphate
  modified_base 11: mod_base = OTHER; note = 2'-O-methylcytidine-3'-phosphate
  modified_base 12: mod_base = OTHER; note = 2'-O-methylcytidine-3'-phosphate
  modified_base 13: mod_base = OTHER; note = 2'-O-methyluridine-3'-phosphate
  modified_base 14: mod_base = OTHER; note = 2'-deoxy-2'-fluorouridine-3'-phosphate
  modified_base 15: mod_base = OTHER; note = 2'-O-methyluridine-3'-phosphate
  modified_base 16: mod_base = OTHER; note = 2'-deoxy-2'-fluoroguanosine-3'-phosphate
  modified_base 17: mod_base = OTHER; note = 2'-O-methylcytidine-3'-phosphate
  modified_base 18: mod_base = OTHER; note = 2'-O-methylcytidine-3'-phosphate
  modified_base 19: mod_base = OTHER; note = 2'-O-methylcytidine-3'-phosphate
  modified_base 20: mod_base = OTHER; note = 2'-O-methyladenosine-3'-phosphate
  modified_base 21: mod_base = OTHER; note = 2'-O-methyladenosine-3'-phosphorothioate
  modified_base 22: mod_base = OTHER; note = 2'-O-methylguanosine-3'-phosphorothioate
  modified_base 23: mod_base = OTHER; note = 2'-O-methylcytidine
ttcatttccacctttgcccaagc

SEQ ID NO: 284 - RNA, 21 nt, synthetic construct
  source 1..21: mol_type = other RNA
  modified_base 1: mod_base = OTHER; note = 2'-O-methyluridine-3'-phosphorothioate
  modified_base 2: mod_base = OTHER; note = 2'-O-methyluridine-3'-phosphorothioate
  modified_base 3: mod_base = OTHER; note = 2'-O-methylguanosine-3'-phosphate
  modified_base 4: mod_base = OTHER; note = 2'-O-methylguanosine-3'-phosphate
  modified_base 5: mod_base = OTHER; note = 2'-O-methylguanosine-3'-phosphate
  modified_base 6: mod_base = OTHER; note = 2'-O-docosanyl-cytidine-3'-phosphate
  modified_base 7: mod_base = OTHER; note = 2'-deoxy-2'-fluoroadenosine-3'-phosphate
  modified_base 8: mod_base = OTHER; note = 2'-O-methyladenosine-3'-phosphate
  modified_base 9: mod_base = OTHER; note = 2'-deoxy-2'-fluoroadenosine-3'-phosphate
  modified_base 10: mod_base = OTHER; note = 2'-deoxy-2'-fluoroguanosine-3'-phosphate
  modified_base 11: mod_base = OTHER; note = 2'-deoxy-2'-fluoroguanosine-3'-phosphate
  modified_base 12: mod_base = OTHER; note = 2'-O-methyluridine-3'-phosphate
  modified_base 13: mod_base = OTHER; note = 2'-O-methylguanosine-3'-phosphate
  modified_base 14: mod_base = OTHER; note = 2'-O-methylguanosine-3'-phosphate
  modified_base 15: mod_base = OTHER; note = 2'-O-methyladenosine-3'-phosphate
  modified_base 16: mod_base = OTHER; note = 2'-O-methyladenosine-3'-phosphate
  modified_base 17: mod_base = OTHER; note = 2'-O-methyladenosine-3'-phosphate
  modified_base 18: mod_base = OTHER; note = 2'-O-methyluridine-3'-phosphate
  modified_base 19: mod_base = OTHER; note = 2'-O-methylguanosine-3'-phosphorothioate
  modified_base 20: mod_base = OTHER; note = 2'-O-methyladenosine-3'-phosphorothioate
  modified_base 21: mod_base = OTHER; note = 2'-O-methyladenosine
ttgggcaaaggtggaaatgaa

SEQ ID NO: 285 - RNA, 23 nt, synthetic construct
  source 1..23: mol_type = other RNA
  modified_base 1: mod_base = OTHER; note = 2'-O-methyluridine-3'-phosphorothioate
  modified_base 2: mod_base = OTHER; note = 2'-deoxy-2'-fluorouridine-3'-phosphorothioate
  modified_base 3: mod_base = OTHER; note = 2'-O-methylcytidine-3'-phosphate
  modified_base 4: mod_base = OTHER; note = 2'-O-methyladenosine-3'-phosphate
  modified_base 5: mod_base = OTHER; note = 2'-O-methyluridine-3'-phosphate
  modified_base 6: mod_base = OTHER; note = 2'-deoxy-2'-fluorouridine-3'-phosphate
  modified_base 7: mod_base = OTHER; note = 2'-O-methyluridine-3'-phosphate
  modified_base 8: mod_base = OTHER; note = 2'-deoxy-2'-fluorocytidine-3'-phosphate
  modified_base 9: mod_base = OTHER; note = 2'-deoxy-2'-fluorocytidine-3'-phosphate
  modified_base 10: mod_base = OTHER; note = 2'-O-methyladenosine-3'-phosphate
  modified_base 11: mod_base = OTHER; note = 2'-O-methylcytidine-3'-phosphate
  modified_base 12: mod_base = OTHER; note = 2'-O-methylcytidine-3'-phosphate
  modified_base 13: mod_base = OTHER; note = 2'-O-methyluridine-3'-phosphate
  modified_base 14: mod_base = OTHER; note = 2'-deoxy-2'-fluorouridine-3'-phosphate
  modified_base 15: mod_base = OTHER; note = 2'-O-methyluridine-3'-phosphate
  modified_base 16: mod_base = OTHER; note = 2'-deoxy-2'-fluoroguanosine-3'-phosphate
  modified_base 17: mod_base = OTHER; note = 2'-O-methylcytidine-3'-phosphate
  modified_base 18: mod_base = OTHER; note = 2'-O-methylcytidine-3'-phosphate
  modified_base 19: mod_base = OTHER; note = 2'-O-methylcytidine-3'-phosphate
  modified_base 20: mod_base = OTHER; note = 2'-O-methyladenosine-3'-phosphate
  modified_base 21: mod_base = OTHER; note = 2'-O-methyladenosine-3'-phosphorothioate
  modified_base 22: mod_base = OTHER; note = 2'-O-methylguanosine-3'-phosphorothioate
  modified_base 23: mod_base = OTHER; note = 2'-O-methylcytidine
ttcatttccacctttgcccaagc

SEQ ID NO: 286 - RNA, 21 nt, synthetic construct
  source 1..21: mol_type = other RNA
  modified_base 1: mod_base = OTHER; note = 2'-O-methyluridine-3'-phosphorothioate
  modified_base 2: mod_base = OTHER; note = 2'-O-methyluridine-3'-phosphorothioate
  modified_base 3: mod_base = OTHER; note = 2'-O-methylguanosine-3'-phosphate
  modified_base 4: mod_base = OTHER; note = 2'-O-methylguanosine-3'-phosphate
  modified_base 5: mod_base = OTHER; note = 2'-O-methylguanosine-3'-phosphate
  modified_base 6: mod_base = OTHER; note = 2'-O-docosanyl-cytidine-3'-phosphate
  modified_base 7: mod_base = OTHER; note = 2'-deoxy-2'-fluoroadenosine-3'-phosphate
  modified_base 8: mod_base = OTHER; note = 2'-O-methyladenosine-3'-phosphate
  modified_base 9: mod_base = OTHER; note = 2'-deoxy-2'-fluoroadenosine-3'-phosphate
  modified_base 10: mod_base = OTHER; note = 2'-deoxy-2'-fluoroguanosine-3'-phosphate
  modified_base 11: mod_base = OTHER; note = 2'-deoxy-2'-fluoroguanosine-3'-phosphate
  modified_base 12: mod_base = OTHER; note = 2'-O-methyluridine-3'-phosphate
  modified_base 13: mod_base = OTHER; note = 2'-O-methylguanosine-3'-phosphate
  modified_base 14: mod_base = OTHER; note = 2'-O-methylguanosine-3'-phosphate
  modified_base 15: mod_base = OTHER; note = 2'-O-methyladenosine-3'-phosphate
  modified_base 16: mod_base = OTHER; note = 2'-O-methyladenosine-3'-phosphate
  modified_base 17: mod_base = OTHER; note = 2'-O-methyladenosine-3'-phosphate
  modified_base 18: mod_base = OTHER; note = 2'-O-methyluridine-3'-phosphate
  modified_base 19: mod_base = OTHER; note = 2'-O-methylguanosine-3'-phosphorothioate
  modified_base 20: mod_base = OTHER; note = 2'-O-methyladenosine-3'-phosphorothioate
  modified_base 21: mod_base = OTHER; note = 2'-O-methyladenosine
ttgggcaaaggtggaaatgaa

SEQ ID NO: 287 - RNA, 23 nt, synthetic construct
  source 1..23: mol_type = other RNA
  modified_base 1: mod_base = OTHER; note = 2'-O-methyluridine-3'-phosphorothioate 5'-(E)-Vinylphosphonate
  modified_base 2: mod_base = OTHER; note = 2'-deoxy-2'-fluorouridine-3'-phosphorothioate
  modified_base 3: mod_base = OTHER; note = 2'-O-methylcytidine-3'-phosphate
  modified_base 4: mod_base = OTHER; note = 2'-O-methyladenosine-3'-phosphate
  modified_base 5: mod_base = OTHER; note = 2'-O-methyluridine-3'-phosphate
  modified_base 6: mod_base = OTHER; note = 2'-deoxy-2'-fluorouridine-3'-phosphate
  modified_base 7: mod_base = OTHER; note = 2'-O-methyluridine-3'-phosphate
  modified_base 8: mod_base = OTHER; note = 2'-deoxy-2'-fluorocytidine-3'-phosphate
  modified_base 9: mod_base = OTHER; note = 2'-deoxy-2'-fluorocytidine-3'-phosphate
  modified_base 10: mod_base = OTHER; note = 2'-O-methyladenosine-3'-phosphate
  modified_base 11: mod_base = OTHER; note = 2'-O-methylcytidine-3'-phosphate
  modified_base 12: mod_base = OTHER; note = 2'-O-methylcytidine-3'-phosphate
  modified_base 13: mod_base = OTHER; note = 2'-O-methyluridine-3'-phosphate
  modified_base 14: mod_base = OTHER; note = 2'-deoxy-2'-fluorouridine-3'-phosphate
  modified_base 15: mod_base = OTHER; note = 2'-O-methyluridine-3'-phosphate
  modified_base 16: mod_base = OTHER; note = 2'-deoxy-2'-fluoroguanosine-3'-phosphate
  modified_base 17: mod_base = OTHER; note = 2'-O-methylcytidine-3'-phosphate
  modified_base 18: mod_base = OTHER; note = 2'-O-methylcytidine-3'-phosphate
  modified_base 19: mod_base = OTHER; note = 2'-O-methylcytidine-3'-phosphate
  modified_base 20: mod_base = OTHER; note = 2'-O-methyladenosine-3'-phosphate
  modified_base 21: mod_base = OTHER; note = 2'-O-methyladenosine-3'-phosphorothioate
  modified_base 22: mod_base = OTHER; note = 2'-O-methylguanosine-3'-phosphorothioate
  modified_base 23: mod_base = OTHER; note = 2'-O-methylcytidine
ttcatttccacctttgcccaagc

SEQ ID NO: 288 - RNA, 21 nt, synthetic construct
  source 1..21: mol_type = other RNA
  modified_base 1: mod_base = OTHER; note = 2'-O-methyluridine-3'-phosphorothioate
  modified_base 2: mod_base = OTHER; note = 2'-O-methyluridine-3'-phosphorothioate
  modified_base 3: mod_base = OTHER; note = 2'-O-methylguanosine-3'-phosphate
  modified_base 4: mod_base = OTHER; note = 2'-O-methylguanosine-3'-phosphate
  modified_base 5: mod_base = OTHER; note = 2'-O-methylguanosine-3'-phosphate
  modified_base 6: mod_base = OTHER; note = 2'-O-docosanyl-cytidine-3'-phosphate
  modified_base 7: mod_base = OTHER; note = 2'-deoxy-2'-fluoroadenosine-3'-phosphate
  modified_base 8: mod_base = OTHER; note = 2'-O-methyladenosine-3'-phosphate
  modified_base 9: mod_base = OTHER; note = 2'-deoxy-2'-fluoroadenosine-3'-phosphate
  modified_base 10: mod_base = OTHER; note = 2'-deoxy-2'-fluoroguanosine-3'-phosphate
  modified_base 11: mod_base = OTHER; note = 2'-deoxy-2'-fluoroguanosine-3'-phosphate
  modified_base 12: mod_base = OTHER; note = 2'-O-methyluridine-3'-phosphate
  modified_base 13: mod_base = OTHER; note = 2'-O-methylguanosine-3'-phosphate
  modified_base 14: mod_base = OTHER; note = 2'-O-methylguanosine-3'-phosphate
  modified_base 15: mod_base = OTHER; note = 2'-O-methyladenosine-3'-phosphate
  modified_base 16: mod_base = OTHER; note = 2'-O-methyladenosine-3'-phosphate
  modified_base 17: mod_base = OTHER; note = 2'-O-methyladenosine-3'-phosphate
  modified_base 18: mod_base = OTHER; note = 2'-O-methyluridine-3'-phosphate
  modified_base 19: mod_base = OTHER; note = 2'-O-methylguanosine-3'-phosphorothioate
  modified_base 20: mod_base = OTHER; note = 2'-O-methyladenosine-3'-phosphorothioate
  modified_base 21: mod_base = OTHER; note = 2'-O-methyladenosine
ttgggcaaaggtggaaatgaa

SEQ ID NO: 289 - RNA, 23 nt, synthetic construct
  source 1..23: mol_type = other RNA
  modified_base 1: mod_base = OTHER; note = 2'-O-methyluridine-3'-phosphorothioate 5'-(cis-3,3,5-trimethyl-1,2-dithiolan-4-yl thiophosphate)
  modified_base 2: mod_base = OTHER; note = 2'-deoxy-2'-fluorouridine-3'-phosphorothioate
  modified_base 3: mod_base = OTHER; note = 2'-O-methylcytidine-3'-phosphate
  modified_base 4: mod_base = OTHER; note = 2'-O-methyladenosine-3'-phosphate
  modified_base 5: mod_base = OTHER; note = 2'-O-methyluridine-3'-phosphate
  modified_base 6: mod_base = OTHER; note = 2'-deoxy-2'-fluorouridine-3'-phosphate
  modified_base 7: mod_base = OTHER; note = 2'-O-methyluridine-3'-phosphate
  modified_base 8: mod_base = OTHER; note = 2'-deoxy-2'-fluorocytidine-3'-phosphate
  modified_base 9: mod_base = OTHER; note = 2'-deoxy-2'-fluorocytidine-3'-phosphate
  modified_base 10: mod_base = OTHER; note = 2'-O-methyladenosine-3'-phosphate
  modified_base 11: mod_base = OTHER; note = 2'-O-methylcytidine-3'-phosphate
  modified_base 12: mod_base = OTHER; note = 2'-O-methylcytidine-3'-phosphate
  modified_base 13: mod_base = OTHER; note = 2'-O-methyluridine-3'-phosphate
  modified_base 14: mod_base = OTHER; note = 2'-deoxy-2'-fluorouridine-3'-phosphate
  modified_base 15: mod_base = OTHER; note = 2'-O-methyluridine-3'-phosphate
  modified_base 16: mod_base = OTHER; note = 2'-deoxy-2'-fluoroguanosine-3'-phosphate
  modified_base 17: mod_base = OTHER; note = 2'-O-methylcytidine-3'-phosphate
  modified_base 18: mod_base = OTHER; note = 2'-O-methylcytidine-3'-phosphate
  modified_base 19: mod_base = OTHER; note = 2'-O-methylcytidine-3'-phosphate
  modified_base 20: mod_base = OTHER; note = 2'-O-methyladenosine-3'-phosphate
  modified_base 21: mod_base = OTHER; note = 2'-O-methyladenosine-3'-phosphorothioate
  modified_base 22: mod_base = OTHER; note = 2'-O-methylguanosine-3'-phosphorothioate
  modified_base 23: mod_base = OTHER; note = 2'-O-methylcytidine
ttcatttccacctttgcccaagc

SEQ ID NO: 290 - RNA, 21 nt, synthetic construct
  source 1..21: mol_type = other RNA
  modified_base 1: mod_base = OTHER; note = 2'-O-methyluridine-3'-phosphorothioate
  modified_base 2: mod_base = OTHER; note = 2'-O-methyluridine-3'-phosphorothioate
  modified_base 3: mod_base = OTHER; note = 2'-O-methylguanosine-3'-phosphate
  modified_base 4: mod_base = OTHER; note = 2'-O-methylguanosine-3'-phosphate
  modified_base 5: mod_base = OTHER; note = 2'-O-methylguanosine-3'-phosphate
  modified_base 6: mod_base = OTHER; note = 2'-O-docosanyl-cytidine-3'-phosphate
  modified_base 7: mod_base = OTHER; note = 2'-deoxy-2'-fluoroadenosine-3'-phosphate
  modified_base 8: mod_base = OTHER; note = 2'-O-methyladenosine-3'-phosphate
  modified_base 9: mod_base = OTHER; note = 2'-deoxy-2'-fluoroadenosine-3'-phosphate
  modified_base 10: mod_base = OTHER; note = 2'-deoxy-2'-fluoroguanosine-3'-phosphate
  modified_base 11: mod_base = OTHER; note = 2'-deoxy-2'-fluoroguanosine-3'-phosphate
  modified_base 12: mod_base = OTHER; note = 2'-O-methyluridine-3'-phosphate
  modified_base 13: mod_base = OTHER; note = 2'-O-methylguanosine-3'-phosphate
  modified_base 14: mod_base = OTHER; note = 2'-O-methylguanosine-3'-phosphate
  modified_base 15: mod_base = OTHER; note = 2'-O-methyladenosine-3'-phosphate
  modified_base 16: mod_base = OTHER; note = 2'-O-methyladenosine-3'-phosphate
  modified_base 17: mod_base = OTHER; note = 2'-O-methyladenosine-3'-phosphate
  modified_base 18: mod_base = OTHER; note = 2'-O-methyluridine-3'-phosphate
  modified_base 19: mod_base = OTHER; note = 2'-O-methylguanosine-3'-phosphorothioate
  modified_base 20: mod_base = OTHER; note = 2'-O-methyladenosine-3'-phosphorothioate
  modified_base 21: mod_base = OTHER; note = 2'-O-methyladenosine
ttgggcaaaggtggaaatgaa

SEQ ID NO: 291 - RNA, 23 nt, synthetic construct
  source 1..23: mol_type = other RNA
  modified_base 1: mod_base = OTHER; note = 2'-O-methyluridine-3'-phosphorothioate 5'-(cis-5-(4-bromophenyl)-3,3-dimethyl-1,2-dithiolan-4-yl thiophosphate)
  modified_base 2: mod_base = OTHER; note = 2'-deoxy-2'-fluorouridine-3'-phosphorothioate
  modified_base 3: mod_base = OTHER; note = 2'-O-methylcytidine-3'-phosphate
  modified_base 4: mod_base = OTHER; note = 2'-O-methyladenosine-3'-phosphate
  modified_base 5: mod_base = OTHER; note = 2'-O-methyluridine-3'-phosphate
  modified_base 6: mod_base = OTHER; note = 2'-deoxy-2'-fluorouridine-3'-phosphate
  modified_base 7: mod_base = OTHER; note = 2'-O-methyluridine-3'-phosphate
  modified_base 8: mod_base = OTHER; note = 2'-deoxy-2'-fluorocytidine-3'-phosphate
  modified_base 9: mod_base = OTHER; note = 2'-deoxy-2'-fluorocytidine-3'-phosphate
  modified_base 10: mod_base = OTHER; note = 2'-O-methyladenosine-3'-phosphate
  modified_base 11: mod_base = OTHER; note = 2'-O-methylcytidine-3'-phosphate
  modified_base 12: mod_base = OTHER; note = 2'-O-methylcytidine-3'-phosphate
  modified_base 13: mod_base = OTHER; note = 2'-O-methyluridine-3'-phosphate
  modified_base 14: mod_base = OTHER; note = 2'-deoxy-2'-fluorouridine-3'-phosphate
  modified_base 15: mod_base = OTHER; note = 2'-O-methyluridine-3'-phosphate
  modified_base 16: mod_base = OTHER; note = 2'-deoxy-2'-fluoroguanosine-3'-phosphate
  modified_base 17: mod_base = OTHER; note = 2'-O-methylcytidine-3'-phosphate
  modified_base 18: mod_base = OTHER; note = 2'-O-methylcytidine-3'-phosphate
  modified_base 19: mod_base = OTHER; note = 2'-O-methylcytidine-3'-phosphate
  modified_base 20: mod_base = OTHER; note = 2'-O-methyladenosine-3'-phosphate
  modified_base 21: mod_base = OTHER; note = 2'-O-methyladenosine-3'-phosphorothioate
  modified_base 22: mod_base = OTHER; note = 2'-O-methylguanosine-3'-phosphorothioate
  modified_base 23: mod_base = OTHER; note = 2'-O-methylcytidine
ttcatttccacctttgcccaagc

SEQ ID NO: 292 - RNA, 21 nt, synthetic construct
  source 1..21: mol_type = other RNA
  modified_base 1: mod_base = OTHER; note = 2'-O-methyluridine-3'-phosphorothioate
  modified_base 2: mod_base = OTHER; note = 2'-O-methyluridine-3'-phosphorothioate
  modified_base 3: mod_base = OTHER; note = 2'-O-methylguanosine-3'-phosphate
  modified_base 4: mod_base = OTHER; note = 2'-O-methylguanosine-3'-phosphate
  modified_base 5: mod_base = OTHER; note = 2'-O-methylguanosine-3'-phosphate
  modified_base 6: mod_base = OTHER; note = 2'-O-docosanyl-cytidine-3'-phosphate
  modified_base 7: mod_base = OTHER; note = 2'-deoxy-2'-fluoroadenosine-3'-phosphate
  modified_base 8: mod_base = OTHER; note = 2'-O-methyladenosine-3'-phosphate
  modified_base 9: mod_base = OTHER; note = 2'-deoxy-2'-fluoroadenosine-3'-phosphate
  modified_base 10: mod_base = OTHER; note = 2'-deoxy-2'-fluoroguanosine-3'-phosphate
  modified_base 11: mod_base = OTHER; note = 2'-deoxy-2'-fluoroguanosine-3'-phosphate
  modified_base 12: mod_base = OTHER; note = 2'-O-methyluridine-3'-phosphate
  modified_base 13: mod_base = OTHER; note = 2'-O-methylguanosine-3'-phosphate
  modified_base 14: mod_base = OTHER; note = 2'-O-methylguanosine-3'-phosphate
  modified_base 15: mod_base = OTHER; note = 2'-O-methyladenosine-3'-phosphate
  modified_base 16: mod_base = OTHER; note = 2'-O-methyladenosine-3'-phosphate
  modified_base 17: mod_base = OTHER; note = 2'-O-methyladenosine-3'-phosphate
  modified_base 18: mod_base = OTHER; note = 2'-O-methyluridine-3'-phosphate
  modified_base 19: mod_base = OTHER; note = 2'-O-methylguanosine-3'-phosphorothioate
  modified_base 20: mod_base = OTHER; note = 2'-O-methyladenosine-3'-phosphorothioate
  modified_base 21: mod_base = OTHER; note = 2'-O-methyladenosine
ttgggcaaaggtggaaatgaa

SEQ ID NO: 293 - RNA, 23 nt, synthetic construct
  source 1..23: mol_type = other RNA
  modified_base 1: mod_base = OTHER; note = 2'-O-methyluridine-3'-phosphorothioate 5'-(cis-5-(4-cyanophenyl)-3,3-dimethyl-1,2-dithiolan-4-yl thiophosphate)
  modified_base 2: mod_base = OTHER; note = 2'-deoxy-2'-fluorouridine-3'-phosphorothioate
  modified_base 3: mod_base = OTHER; note = 2'-O-methylcytidine-3'-phosphate
  modified_base 4: mod_base = OTHER; note = 2'-O-methyladenosine-3'-phosphate
  modified_base 5: mod_base = OTHER; note = 2'-O-methyluridine-3'-phosphate
  modified_base 6: mod_base = OTHER; note = 2'-deoxy-2'-fluorouridine-3'-phosphate
  modified_base 7: mod_base = OTHER; note = 2'-O-methyluridine-3'-phosphate
  modified_base 8: mod_base = OTHER; note = 2'-deoxy-2'-fluorocytidine-3'-phosphate
  modified_base 9: mod_base = OTHER; note = 2'-deoxy-2'-fluorocytidine-3'-phosphate
  modified_base 10: mod_base = OTHER; note = 2'-O-methyladenosine-3'-phosphate
  modified_base 11: mod_base = OTHER; note = 2'-O-methylcytidine-3'-phosphate
  modified_base 12: mod_base = OTHER; note = 2'-O-methylcytidine-3'-phosphate
  modified_base 13: mod_base = OTHER; note = 2'-O-methyluridine-3'-phosphate
  modified_base 14: mod_base = OTHER; note = 2'-deoxy-2'-fluorouridine-3'-phosphate
  modified_base 15: mod_base = OTHER; note = 2'-O-methyluridine-3'-phosphate
  modified_base 16: mod_base = OTHER; note = 2'-deoxy-2'-fluoroguanosine-3'-phosphate
  modified_base 17: mod_base = OTHER; note = 2'-O-methylcytidine-3'-phosphate
  modified_base 18: mod_base = OTHER; note = 2'-O-methylcytidine-3'-phosphate
  modified_base 19: mod_base = OTHER; note = 2'-O-methylcytidine-3'-phosphate
  modified_base 20: mod_base = OTHER; note = 2'-O-methyladenosine-3'-phosphate
  modified_base 21: mod_base = OTHER; note = 2'-O-methyladenosine-3'-phosphorothioate
  modified_base 22: mod_base = OTHER; note = 2'-O-methylguanosine-3'-phosphorothioate
  modified_base 23: mod_base = OTHER; note = 2'-O-methylcytidine
ttcatttccacctttgcccaagc

SEQ ID NO: 294 - RNA, 21 nt, synthetic construct
  source 1..21: mol_type = other RNA
  modified_base 1: mod_base = OTHER; note = 2'-O-methyluridine-3'-phosphorothioate
  modified_base 2: mod_base = OTHER; note = 2'-O-methyluridine-3'-phosphorothioate
  modified_base 3: mod_base = OTHER; note = 2'-O-methylguanosine-3'-phosphate
  modified_base 4: mod_base = OTHER; note = 2'-O-methylguanosine-3'-phosphate
  modified_base 5: mod_base = OTHER; note = 2'-O-methylguanosine-3'-phosphate
  modified_base 6: mod_base = OTHER; note = 2'-O-docosanyl-cytidine-3'-phosphate
  modified_base 7: mod_base = OTHER; note = 2'-deoxy-2'-fluoroadenosine-3'-phosphate
  modified_base 8: mod_base = OTHER; note = 2'-O-methyladenosine-3'-phosphate
  modified_base 9: mod_base = OTHER; note = 2'-deoxy-2'-fluoroadenosine-3'-phosphate
  modified_base 10: mod_base = OTHER; note = 2'-deoxy-2'-fluoroguanosine-3'-phosphate
  modified_base 11: mod_base = OTHER; note = 2'-deoxy-2'-fluoroguanosine-3'-phosphate
  modified_base 12: mod_base = OTHER; note = 2'-O-methyluridine-3'-phosphate
  modified_base 13: mod_base = OTHER; note = 2'-O-methylguanosine-3'-phosphate
  modified_base 14: mod_base = OTHER; note = 2'-O-methylguanosine-3'-phosphate
  modified_base 15: mod_base = OTHER; note = 2'-O-methyladenosine-3'-phosphate
  modified_base 16: mod_base = OTHER; note = 2'-O-methyladenosine-3'-phosphate
  modified_base 17: mod_base = OTHER; note = 2'-O-methyladenosine-3'-phosphate
  modified_base 18: mod_base = OTHER; note = 2'-O-methyluridine-3'-phosphate
  modified_base 19: mod_base = OTHER; note = 2'-O-methylguanosine-3'-phosphorothioate
  modified_base 20: mod_base = OTHER; note = 2'-O-methyladenosine-3'-phosphorothioate
  modified_base 21: mod_base = OTHER; note = 2'-O-methyladenosine
ttgggcaaaggtggaaatgaa

SEQ ID NO: 295 - RNA, 23 nt, synthetic construct
  source 1..23: mol_type = other RNA
  modified_base 1: mod_base = OTHER; note = 2'-O-methyluridine-3'-phosphorothioate 5'-(cis-5-(4-fluorophenyl)-3,3-dimethyl-1,2-dithiolan-4-yl thiophosphate)
  modified_base 2: mod_base = OTHER; note = 2'-deoxy-2'-fluorouridine-3'-phosphorothioate
  modified_base 3: mod_base = OTHER; note = 2'-O-methylcytidine-3'-phosphate
  modified_base 4: mod_base = OTHER; note = 2'-O-methyladenosine-3'-phosphate
  modified_base 5: mod_base = OTHER; note = 2'-O-methyluridine-3'-phosphate
  modified_base 6: mod_base = OTHER; note = 2'-deoxy-2'-fluorouridine-3'-phosphate
  modified_base 7: mod_base = OTHER; note = 2'-O-methyluridine-3'-phosphate
  modified_base 8: mod_base = OTHER; note = 2'-deoxy-2'-fluorocytidine-3'-phosphate
  modified_base 9: mod_base = OTHER; note = 2'-deoxy-2'-fluorocytidine-3'-phosphate
  modified_base 10: mod_base = OTHER; note = 2'-O-methyladenosine-3'-phosphate
  modified_base 11: mod_base = OTHER; note = 2'-O-methylcytidine-3'-phosphate
  modified_base 12: mod_base = OTHER; note = 2'-O-methylcytidine-3'-phosphate
  modified_base 13: mod_base = OTHER; note = 2'-O-methyluridine-3'-phosphate
  modified_base 14: mod_base = OTHER; note = 2'-deoxy-2'-fluorouridine-3'-phosphate
  modified_base 15: mod_base = OTHER; note = 2'-O-methyluridine-3'-phosphate
  modified_base 16: mod_base = OTHER; note = 2'-deoxy-2'-fluoroguanosine-3'-phosphate
  modified_base 17: mod_base = OTHER; note = 2'-O-methylcytidine-3'-phosphate
  modified_base 18: mod_base = OTHER; note = 2'-O-methylcytidine-3'-phosphate
  modified_base 19: mod_base = OTHER; note = 2'-O-methylcytidine-3'-phosphate
  modified_base 20: mod_base = OTHER; note = 2'-O-methyladenosine-3'-phosphate
  modified_base 21: mod_base = OTHER; note = 2'-O-methyladenosine-3'-phosphorothioate
  modified_base 22: mod_base = OTHER; note = 2'-O-methylguanosine-3'-phosphorothioate
  modified_base 23: mod_base = OTHER; note = 2'-O-methylcytidine
ttcatttccacctttgcccaagc

SEQ ID NO: 296 - RNA, 21 nt, synthetic construct
  source 1..21: mol_type = other RNA
  modified_base 1: mod_base = OTHER; note = 2'-O-methyluridine-3'-phosphorothioate
  modified_base 2: mod_base = OTHER; note = 2'-O-methyluridine-3'-phosphorothioate
  modified_base 3: mod_base = OTHER; note = 2'-O-methylguanosine-3'-phosphate
  modified_base 4: mod_base = OTHER; note = 2'-O-methylguanosine-3'-phosphate
  modified_base 5: mod_base = OTHER; note = 2'-O-methylguanosine-3'-phosphate
  modified_base 6: mod_base = OTHER; note = 2'-O-docosanyl-cytidine-3'-phosphate
  modified_base 7: mod_base = OTHER; note = 2'-deoxy-2'-fluoroadenosine-3'-phosphate
  modified_base 8: mod_base = OTHER; note = 2'-O-methyladenosine-3'-phosphate
  modified_base 9: mod_base = OTHER; note = 2'-deoxy-2'-fluoroadenosine-3'-phosphate
  modified_base 10: mod_base = OTHER; note = 2'-deoxy-2'-fluoroguanosine-3'-phosphate
  modified_base 11: mod_base = OTHER; note = 2'-deoxy-2'-fluoroguanosine-3'-phosphate
  modified_base 12: mod_base = OTHER; note = 2'-O-methyluridine-3'-phosphate
  modified_base 13: mod_base = OTHER; note = 2'-O-methylguanosine-3'-phosphate
  modified_base 14: mod_base = OTHER; note = 2'-O-methylguanosine-3'-phosphate
  modified_base 15: mod_base = OTHER; note = 2'-O-methyladenosine-3'-phosphate
  modified_base 16: mod_base = OTHER; note = 2'-O-methyladenosine-3'-phosphate
  modified_base 17: mod_base = OTHER; note = 2'-O-methyladenosine-3'-phosphate
  modified_base 18: mod_base = OTHER; note = 2'-O-methyluridine-3'-phosphate
  modified_base 19: mod_base = OTHER; note = 2'-O-methylguanosine-3'-phosphorothioate
  modified_base 20: mod_base = OTHER; note = 2'-O-methyladenosine-3'-phosphorothioate
  modified_base 21: mod_base = OTHER; note = 2'-O-methyladenosine
ttgggcaaaggtggaaatgaa

SEQ ID NO: 297 - RNA, 23 nt, synthetic construct
  source 1..23: mol_type = other RNA
  modified_base 1: mod_base = OTHER; note = 2'-O-methyluridine-3'-phosphorothioate 5'-(cis-5-(benzo[1,3]dioxol-6-yl)-3,3-dimethyl-1,2-dithiola n-4-yl thiophosphate)
  modified_base 2: mod_base = OTHER; note = 2'-deoxy-2'-fluorouridine-3'-phosphorothioate
  modified_base 3: mod_base = OTHER; note = 2'-O-methylcytidine-3'-phosphate
  modified_base 4: mod_base = OTHER; note = 2'-O-methyladenosine-3'-phosphate
  modified_base 5: mod_base = OTHER; note = 2'-O-methyluridine-3'-phosphate
  modified_base 6: mod_base = OTHER; note = 2'-deoxy-2'-fluorouridine-3'-phosphate
  modified_base 7: mod_base = OTHER; note = 2'-O-methyluridine-3'-phosphate
  modified_base 8: mod_base = OTHER; note = 2'-deoxy-2'-fluorocytidine-3'-phosphate
  modified_base 9: mod_base = OTHER; note = 2'-deoxy-2'-fluorocytidine-3'-phosphate
  modified_base 10: mod_base = OTHER; note = 2'-O-methyladenosine-3'-phosphate
  modified_base 11: mod_base = OTHER; note = 2'-O-methylcytidine-3'-phosphate
  modified_base 12: mod_base = OTHER; note = 2'-O-methylcytidine-3'-phosphate
  modified_base 13: mod_base = OTHER; note = 2'-O-methyluridine-3'-phosphate
  modified_base 14: mod_base = OTHER; note = 2'-deoxy-2'-fluorouridine-3'-phosphate
  modified_base 15: mod_base = OTHER; note = 2'-O-methyluridine-3'-phosphate
  modified_base 16: mod_base = OTHER; note = 2'-deoxy-2'-fluoroguanosine-3'-phosphate
  modified_base 17: mod_base = OTHER; note = 2'-O-methylcytidine-3'-phosphate
  modified_base 18: mod_base = OTHER; note = 2'-O-methylcytidine-3'-phosphate
  modified_base 19: mod_base = OTHER; note = 2'-O-methylcytidine-3'-phosphate
  modified_base 20: mod_base = OTHER; note = 2'-O-methyladenosine-3'-phosphate
  modified_base 21: mod_base = OTHER; note = 2'-O-methyladenosine-3'-phosphorothioate
  modified_base 22: mod_base = OTHER; note = 2'-O-methylguanosine-3'-phosphorothioate
  modified_base 23: mod_base = OTHER; note = 2'-O-methylcytidine
ttcatttccacctttgcccaagc

SEQ ID NO: 298 - RNA, 21 nt, synthetic construct
  source 1..21: mol_type = other RNA
  modified_base 1: mod_base = OTHER; note = 2'-O-methyluridine-3'-phosphorothioate
  modified_base 2: mod_base = OTHER; note = 2'-O-methyluridine-3'-phosphorothioate
  modified_base 3: mod_base = OTHER; note = 2'-O-methylguanosine-3'-phosphate
  modified_base 4: mod_base = OTHER; note = 2'-O-methylguanosine-3'-phosphate
  modified_base 5: mod_base = OTHER; note = 2'-O-methylguanosine-3'-phosphate
  modified_base 6: mod_base = OTHER; note = 2'-O-docosanyl-cytidine-3'-phosphate
  modified_base 7: mod_base = OTHER; note = 2'-deoxy-2'-fluoroadenosine-3'-phosphate
  modified_base 8: mod_base = OTHER; note = 2'-O-methyladenosine-3'-phosphate
  modified_base 9: mod_base = OTHER; note = 2'-deoxy-2'-fluoroadenosine-3'-phosphate
  modified_base 10: mod_base = OTHER; note = 2'-deoxy-2'-fluoroguanosine-3'-phosphate
  modified_base 11: mod_base = OTHER; note = 2'-deoxy-2'-fluoroguanosine-3'-phosphate
  modified_base 12: mod_base = OTHER; note = 2'-O-methyluridine-3'-phosphate
  modified_base 13: mod_base = OTHER; note = 2'-O-methylguanosine-3'-phosphate
  modified_base 14: mod_base = OTHER; note = 2'-O-methylguanosine-3'-phosphate
  modified_base 15: mod_base = OTHER; note = 2'-O-methyladenosine-3'-phosphate
  modified_base 16: mod_base = OTHER; note = 2'-O-methyladenosine-3'-phosphate
  modified_base 17: mod_base = OTHER; note = 2'-O-methyladenosine-3'-phosphate
  modified_base 18: mod_base = OTHER; note = 2'-O-methyluridine-3'-phosphate
  modified_base 19: mod_base = OTHER; note = 2'-O-methylguanosine-3'-phosphorothioate
  modified_base 20: mod_base = OTHER; note = 2'-O-methyladenosine-3'-phosphorothioate
  modified_base 21: mod_base = OTHER; note = 2'-O-methyladenosine
ttgggcaaaggtggaaatgaa

SEQ ID NO: 299 - RNA, 23 nt, synthetic construct
  source 1..23: mol_type = other RNA
  modified_base 1: mod_base = OTHER; note = 2'-O-methyluridine-3'-phosphorothioate 5'-(cis-5-(2-methylphenyl)-3,3-dimethyl-1,2-dithiolan-4-yl thiophosphate)
  modified_base 2: mod_base = OTHER; note = 2'-deoxy-2'-fluorouridine-3'-phosphorothioate
  modified_base 3: mod_base = OTHER; note = 2'-O-methylcytidine-3'-phosphate
  modified_base 4: mod_base = OTHER; note = 2'-O-methyladenosine-3'-phosphate
  modified_base 5: mod_base = OTHER; note = 2'-O-methyluridine-3'-phosphate
  modified_base 6: mod_base = OTHER; note = 2'-deoxy-2'-fluorouridine-3'-phosphate
  modified_base 7: mod_base = OTHER; note = 2'-O-methyluridine-3'-phosphate
  modified_base 8: mod_base = OTHER; note = 2'-deoxy-2'-fluorocytidine-3'-phosphate
  modified_base 9: mod_base = OTHER; note = 2'-deoxy-2'-fluorocytidine-3'-phosphate
  modified_base 10: mod_base = OTHER; note = 2'-O-methyladenosine-3'-phosphate
  modified_base 11: mod_base = OTHER; note = 2'-O-methylcytidine-3'-phosphate
  modified_base 12: mod_base = OTHER; note = 2'-O-methylcytidine-3'-phosphate
  modified_base 13: mod_base = OTHER; note = 2'-O-methyluridine-3'-phosphate
  modified_base 14: mod_base = OTHER; note = 2'-deoxy-2'-fluorouridine-3'-phosphate
  modified_base 15: mod_base = OTHER; note = 2'-O-methyluridine-3'-phosphate
  modified_base 16: mod_base = OTHER; note = 2'-deoxy-2'-fluoroguanosine-3'-phosphate
  modified_base 17: mod_base = OTHER; note = 2'-O-methylcytidine-3'-phosphate
  modified_base 18: mod_base = OTHER; note = 2'-O-methylcytidine-3'-phosphate
  modified_base 19: mod_base = OTHER; note = 2'-O-methylcytidine-3'-phosphate
  modified_base 20: mod_base = OTHER; note = 2'-O-methyladenosine-3'-phosphate
  modified_base 21: mod_base = OTHER; note = 2'-O-methyladenosine-3'-phosphorothioate
  modified_base 22: mod_base = OTHER; note = 2'-O-methylguanosine-3'-phosphorothioate
  modified_base 23: mod_base = OTHER; note = 2'-O-methylcytidine
ttcatttccacctttgcccaagc

SEQ ID NO: 300 - RNA, 21 nt, synthetic construct
  source 1..21: mol_type = other RNA
  modified_base 1: mod_base = OTHER; note = 2'-O-methyluridine-3'-phosphorothioate
  modified_base 2: mod_base = OTHER; note = 2'-O-methyluridine-3'-phosphorothioate
  modified_base 3: mod_base = OTHER; note = 2'-O-methylguanosine-3'-phosphate
  modified_base 4: mod_base = OTHER; note = 2'-O-methylguanosine-3'-phosphate
  modified_base 5: mod_base = OTHER; note = 2'-O-methylguanosine-3'-phosphate
  modified_base 6: mod_base = OTHER; note = 2'-O-docosanyl-cytidine-3'-phosphate
  modified_base 7: mod_base = OTHER; note = 2'-deoxy-2'-fluoroadenosine-3'-phosphate
  modified_base 8: mod_base = OTHER; note = 2'-O-methyladenosine-3'-phosphate
  modified_base 9: mod_base = OTHER; note = 2'-deoxy-2'-fluoroadenosine-3'-phosphate
  modified_base 10: mod_base = OTHER; note = 2'-deoxy-2'-fluoroguanosine-3'-phosphate
  modified_base 11: mod_base = OTHER; note = 2'-deoxy-2'-fluoroguanosine-3'-phosphate
  modified_base 12: mod_base = OTHER; note = 2'-O-methyluridine-3'-phosphate
  modified_base 13: mod_base = OTHER; note = 2'-O-methylguanosine-3'-phosphate
  modified_base 14: mod_base = OTHER; note = 2'-O-methylguanosine-3'-phosphate
  modified_base 15: mod_base = OTHER; note = 2'-O-methyladenosine-3'-phosphate
  modified_base 16: mod_base = OTHER; note = 2'-O-methyladenosine-3'-phosphate
  modified_base 17: mod_base = OTHER; note = 2'-O-methyladenosine-3'-phosphate
  modified_base 18: mod_base = OTHER; note = 2'-O-methyluridine-3'-phosphate
  modified_base 19: mod_base = OTHER; note = 2'-O-methylguanosine-3'-phosphorothioate
  modified_base 20: mod_base = OTHER; note = 2'-O-methyladenosine-3'-phosphorothioate
  modified_base 21: mod_base = OTHER; note = 2'-O-methyladenosine
ttgggcaaaggtggaaatgaa

SEQ ID NO: 301 - RNA, 23 nt, synthetic construct
  source 1..23: mol_type = other RNA
  modified_base 1: mod_base = OTHER; note = 2'-O-methyluridine-3'-phosphorothioate 5'-(cis-5-(2-methoxyphenyl)-3,3-dimethyl-1,2-dithiolan-4-yl thiophosphate)
  modified_base 2: mod_base = OTHER; note = 2'-deoxy-2'-fluorouridine-3'-phosphorothioate
  modified_base 3: mod_base = OTHER; note = 2'-O-methylcytidine-3'-phosphate
  modified_base 4: mod_base = OTHER; note = 2'-O-methyladenosine-3'-phosphate
  modified_base 5: mod_base = OTHER; note = 2'-O-methyluridine-3'-phosphate
  modified_base 6: mod_base = OTHER; note = 2'-deoxy-2'-fluorouridine-3'-phosphate
  modified_base 7: mod_base = OTHER; note = 2'-O-methyluridine-3'-phosphate
  modified_base 8: mod_base = OTHER; note = 2'-deoxy-2'-fluorocytidine-3'-phosphate
  modified_base 9: mod_base = OTHER; note = 2'-deoxy-2'-fluorocytidine-3'-phosphate
  modified_base 10: mod_base = OTHER; note = 2'-O-methyladenosine-3'-phosphate
  modified_base 11: mod_base = OTHER; note = 2'-O-methylcytidine-3'-phosphate
  modified_base 12: mod_base = OTHER; note = 2'-O-methylcytidine-3'-phosphate
  modified_base 13: mod_base = OTHER; note = 2'-O-methyluridine-3'-phosphate
  modified_base 14: mod_base = OTHER; note = 2'-deoxy-2'-fluorouridine-3'-phosphate
  modified_base 15: mod_base = OTHER; note = 2'-O-methyluridine-3'-phosphate
  modified_base 16: mod_base = OTHER; note = 2'-deoxy-2'-fluoroguanosine-3'-phosphate
  modified_base 17: mod_base = OTHER; note = 2'-O-methylcytidine-3'-phosphate
  modified_base 18: mod_base = OTHER; note = 2'-O-methylcytidine-3'-phosphate
  modified_base 19: mod_base = OTHER; note = 2'-O-methylcytidine-3'-phosphate
  modified_base 20: mod_base = OTHER; note = 2'-O-methyladenosine-3'-phosphate
  modified_base 21: mod_base = OTHER; note = 2'-O-methyladenosine-3'-phosphorothioate
  modified_base 22: mod_base = OTHER; note = 2'-O-methylguanosine-3'-phosphorothioate
  modified_base 23: mod_base = OTHER; note = 2'-O-methylcytidine
ttcatttccacctttgcccaagc

SEQ ID NO: 302 - RNA, 21 nt, synthetic construct
  source 1..21: mol_type = other RNA
  modified_base 1: mod_base = OTHER; note = 2'-O-methyluridine-3'-phosphorothioate
  modified_base 2: mod_base = OTHER; note = 2'-O-methyluridine-3'-phosphorothioate
  modified_base 3: mod_base = OTHER; note = 2'-O-methylguanosine-3'-phosphate
  modified_base 4: mod_base = OTHER; note = 2'-O-methylguanosine-3'-phosphate
  modified_base 5: mod_base = OTHER; note = 2'-O-methylguanosine-3'-phosphate
  modified_base 6: mod_base = OTHER; note = 2'-O-docosanyl-cytidine-3'-phosphate
  modified_base 7: mod_base = OTHER; note = 2'-deoxy-2'-fluoroadenosine-3'-phosphate
  modified_base 8: mod_base = OTHER; note = 2'-O-methyladenosine-3'-phosphate
  modified_base 9: mod_base = OTHER; note = 2'-deoxy-2'-fluoroadenosine-3'-phosphate
  modified_base 10: mod_base = OTHER; note = 2'-deoxy-2'-fluoroguanosine-3'-phosphate
  modified_base 11: mod_base = OTHER; note = 2'-deoxy-2'-fluoroguanosine-3'-phosphate
  modified_base 12: mod_base = OTHER; note = 2'-O-methyluridine-3'-phosphate
  modified_base 13: mod_base = OTHER; note = 2'-O-methylguanosine-3'-phosphate
  modified_base 14: mod_base = OTHER; note = 2'-O-methylguanosine-3'-phosphate
  modified_base 15: mod_base = OTHER; note = 2'-O-methyladenosine-3'-phosphate
  modified_base 16: mod_base = OTHER; note = 2'-O-methyladenosine-3'-phosphate
  modified_base 17: mod_base = OTHER; note = 2'-O-methyladenosine-3'-phosphate
  modified_base 18: mod_base = OTHER; note = 2'-O-methyluridine-3'-phosphate
  modified_base 19: mod_base = OTHER; note = 2'-O-methylguanosine-3'-phosphorothioate
  modified_base 20: mod_base = OTHER; note = 2'-O-methyladenosine-3'-phosphorothioate
  modified_base 21: mod_base = OTHER; note = 2'-O-methyladenosine
ttgggcaaaggtggaaatgaa

SEQ ID NO: 303 - RNA, 23 nt, synthetic construct
  source 1..23: mol_type = other RNA
  modified_base 1: mod_base = OTHER; note = 2'-O-methyluridine-3'-phosphorothioate 5'-((cis-3,3,5-trimethyl-1,2-dithiolan-4-yl) (1,3-dimethylimidazolidin-2-ylidene)phosphoramidate)
  modified_base 2: mod_base = OTHER; note = 2'-deoxy-2'-fluorouridine-3'-phosphorothioate
  modified_base 3: mod_base = OTHER; note = 2'-O-methylcytidine-3'-phosphate
  modified_base 4: mod_base = OTHER; note = 2'-O-methyladenosine-3'-phosphate
  modified_base 5: mod_base = OTHER; note = 2'-O-methyluridine-3'-phosphate
  modified_base 6: mod_base = OTHER; note = 2'-deoxy-2'-fluorouridine-3'-phosphate
  modified_base 7: mod_base = OTHER; note = 2'-O-methyluridine-3'-phosphate
  modified_base 8: mod_base = OTHER; note = 2'-deoxy-2'-fluorocytidine-3'-phosphate
  modified_base 9: mod_base = OTHER; note = 2'-deoxy-2'-fluorocytidine-3'-phosphate
  modified_base 10: mod_base = OTHER; note = 2'-O-methyladenosine-3'-phosphate
  modified_base 11: mod_base = OTHER; note = 2'-O-methylcytidine-3'-phosphate
  modified_base 12: mod_base = OTHER; note = 2'-O-methylcytidine-3'-phosphate
  modified_base 13: mod_base = OTHER; note = 2'-O-methyluridine-3'-phosphate
  modified_base 14: mod_base = OTHER; note = 2'-deoxy-2'-fluorouridine-3'-phosphate
  modified_base 15: mod_base = OTHER; note = 2'-O-methyluridine-3'-phosphate
  modified_base 16: mod_base = OTHER; note = 2'-deoxy-2'-fluoroguanosine-3'-phosphate
  modified_base 17: mod_base = OTHER; note = 2'-O-methylcytidine-3'-phosphate
  modified_base 18: mod_base = OTHER; note = 2'-O-methylcytidine-3'-phosphate
  modified_base 19: mod_base = OTHER; note = 2'-O-methylcytidine-3'-phosphate
  modified_base 20: mod_base = OTHER; note = 2'-O-methyladenosine-3'-phosphate
  modified_base 21: mod_base = OTHER; note = 2'-O-methyladenosine-3'-phosphorothioate
  modified_base 22: mod_base = OTHER; note = 2'-O-methylguanosine-3'-phosphorothioate
  modified_base 23: mod_base = OTHER; note = 2'-O-methylcytidine
ttcatttccacctttgcccaagc

SEQ ID NO: 304 - RNA, 21 nt, synthetic construct
  source 1..21: mol_type = other RNA
  modified_base 1: mod_base = OTHER; note = 2'-O-methyluridine-3'-phosphorothioate
  modified_base 2: mod_base = OTHER; note = 2'-O-methyluridine-3'-phosphorothioate
  modified_base 3: mod_base = OTHER; note = 2'-O-methylguanosine-3'-phosphate
  modified_base 4: mod_base = OTHER; note = 2'-O-methylguanosine-3'-phosphate
  modified_base 5: mod_base = OTHER; note = 2'-O-methylguanosine-3'-phosphate
  modified_base 6: mod_base = OTHER; note = 2'-O-docosanyl-cytidine-3'-phosphate
  modified_base 7: mod_base = OTHER; note = 2'-deoxy-2'-fluoroadenosine-3'-phosphate
  modified_base 8: mod_base = OTHER; note = 2'-O-methyladenosine-3'-phosphate
  modified_base 9: mod_base = OTHER; note = 2'-deoxy-2'-fluoroadenosine-3'-phosphate
  modified_base 10: mod_base = OTHER; note = 2'-deoxy-2'-fluoroguanosine-3'-phosphate
  modified_base 11: mod_base = OTHER; note = 2'-deoxy-2'-fluoroguanosine-3'-phosphate
  modified_base 12: mod_base = OTHER; note = 2'-O-methyluridine-3'-phosphate
  modified_base 13: mod_base = OTHER; note = 2'-O-methylguanosine-3'-phosphate
  modified_base 14: mod_base = OTHER; note = 2'-O-methylguanosine-3'-phosphate
  modified_base 15: mod_base = OTHER; note = 2'-O-methyladenosine-3'-phosphate
  modified_base 16: mod_base = OTHER; note = 2'-O-methyladenosine-3'-phosphate
  modified_base 17: mod_base = OTHER; note = 2'-O-methyladenosine-3'-phosphate
  modified_base 18: mod_base = OTHER; note = 2'-O-methyluridine-3'-phosphate
  modified_base 19: mod_base = OTHER; note = 2'-O-methylguanosine-3'-phosphorothioate
  modified_base 20: mod_base = OTHER; note = 2'-O-methyladenosine-3'-phosphorothioate
  modified_base 21: mod_base = OTHER; note = 2'-O-methyladenosine
ttgggcaaaggtggaaatgaa

SEQ ID NO: 305 - RNA, 23 nt, synthetic construct
  source 1..23: mol_type = other RNA
  modified_base 1: mod_base = OTHER; note = 2'-O-methyluridine-3'-phosphorothioate 5'-((cis-3,3,5-trimethyl-1,2-dithiolan-4-yl) (N-methylsulfonyl) phosphimidate)
  modified_base 2: mod_base = OTHER; note = 2'-deoxy-2'-fluorouridine-3'-phosphorothioate
  modified_base 3: mod_base = OTHER; note = 2'-O-methylcytidine-3'-phosphate
  modified_base 4: mod_base = OTHER; note = 2'-O-methyladenosine-3'-phosphate
  modified_base 5: mod_base = OTHER; note = 2'-O-methyluridine-3'-phosphate
  modified_base 6: mod_base = OTHER; note = 2'-deoxy-2'-fluorouridine-3'-phosphate
  modified_base 7: mod_base = OTHER; note = 2'-O-methyluridine-3'-phosphate
  modified_base 8: mod_base = OTHER; note = 2'-deoxy-2'-fluorocytidine-3'-phosphate
  modified_base 9: mod_base = OTHER; note = 2'-deoxy-2'-fluorocytidine-3'-phosphate
  modified_base 10: mod_base = OTHER; note = 2'-O-methyladenosine-3'-phosphate
  modified_base 11: mod_base = OTHER; note = 2'-O-methylcytidine-3'-phosphate
  modified_base 12: mod_base = OTHER; note = 2'-O-methylcytidine-3'-phosphate
  modified_base 13: mod_base = OTHER; note = 2'-O-methyluridine-3'-phosphate
  modified_base 14: mod_base = OTHER; note = 2'-deoxy-2'-fluorouridine-3'-phosphate
  modified_base 15: mod_base = OTHER; note = 2'-O-methyluridine-3'-phosphate
  modified_base 16: mod_base = OTHER; note = 2'-deoxy-2'-fluoroguanosine-3'-phosphate
  modified_base 17: mod_base = OTHER; note = 2'-O-methylcytidine-3'-phosphate
  modified_base 18: mod_base = OTHER; note = 2'-O-methylcytidine-3'-phosphate
  modified_base 19: mod_base = OTHER; note = 2'-O-methylcytidine-3'-phosphate
  modified_base 20: mod_base = OTHER; note = 2'-O-methyladenosine-3'-phosphate
  modified_base 21: mod_base = OTHER; note = 2'-O-methyladenosine-3'-phosphorothioate
  modified_base 22: mod_base = OTHER; note = 2'-O-methylguanosine-3'-phosphorothioate
  modified_base 23: mod_base = OTHER; note = 2'-O-methylcytidine
ttcatttccacctttgcccaagc

SEQ ID NO: 306 - RNA, 21 nt, synthetic construct
  source 1..21: mol_type = other RNA
  modified_base 1: mod_base = OTHER; note = 2'-O-methylcytidine-3'-phosphorothioate
  modified_base 2: mod_base = OTHER; note = 2'-O-methyladenosine-3'-phosphorothioate
  modified_base 3: mod_base = OTHER; note = 2'-O-methyluridine-3'-phosphate
  modified_base 4: mod_base = OTHER; note = 2'-O-methyluridine-3'-phosphate
  modified_base 5: mod_base = OTHER; note = 2'-O-methyluridine-3'-phosphate
  modified_base 6: mod_base = OTHER; note = 2'-O-methyluridine 3'-(1-methyl-3-docosanylimidazolidin-2-ylidene)phosphoramid ate
  modified_base 7: mod_base = OTHER; note = 2'-deoxy-2'-fluoroadenosine-3'-phosphate
  modified_base 8: mod_base = OTHER; note = 2'-O-methyladenosine-3'-phosphate
  modified_base 9: mod_base = OTHER; note = 2'-deoxy-2'-fluorouridine-3'-phosphate
  modified_base 10: mod_base = OTHER; note = 2'-deoxy-2'-fluorocytidine-3'-phosphate
  modified_base 11: mod_base = OTHER; note = 2'-deoxy-2'-fluorocytidine-3'-phosphate
  modified_base 12: mod_base = OTHER; note = 2'-O-methyluridine-3'-phosphate
  modified_base 13: mod_base = OTHER; note = 2'-O-methylcytidine-3'-phosphate
  modified_base 14: mod_base = OTHER; note = 2'-O-methyladenosine-3'-phosphate
  modified_base 15: mod_base = OTHER; note = 2'-O-methylcytidine-3'-phosphate
  modified_base 16: mod_base = OTHER; note = 2'-O-methyluridine-3'-phosphate
  modified_base 17: mod_base = OTHER; note = 2'-O-methylcytidine-3'-phosphate
  modified_base 18: mod_base = OTHER; note = 2'-O-methyluridine-3'-phosphate
  modified_base 19: mod_base = OTHER; note = 2'-O-methyladenosine-3'-phosphorothioate
  modified_base 20: mod_base = OTHER; note = 2'-O-methyladenosine-3'-phosphorothioate
  modified_base 21: mod_base = OTHER; note = 2'-O-methyladenosine
cattttaatcctcactctaaa

SEQ ID NO: 307 - RNA, 23 nt, synthetic construct
  source 1..23: mol_type = other RNA
  modified_base 1: mod_base = OTHER; note = 2'-O-methyluridine-3'-phosphorothioate 5'-(E)-Vinylphosphonate
  modified_base 2: mod_base = OTHER; note = 2'-deoxy-2'-fluorouridine-3'-phosphorothioate
  modified_base 3: mod_base = OTHER; note = 2'-O-methyluridine-3'-phosphate
  modified_base 4: mod_base = OTHER; note = 2'-O-methyladenosine-3'-phosphate
  modified_base 5: mod_base = OTHER; note = 2'-O-methylguanosine-3'-phosphate
  modified_base 6: mod_base = OTHER; note = 2'-deoxy-2'-fluoroadenosine-3'-phosphate
  modified_base 7: mod_base = OTHER; note = 2'-O-methylguanosine-3'-phosphate
  modified_base 8: mod_base = OTHER; note = 2'-deoxy-2'-fluorouridine-3'-phosphate
  modified_base 9: mod_base = OTHER; note = 2'-deoxy-2'-fluoroguanosine-3'-phosphate
  modified_base 10: mod_base = OTHER; note = 2'-O-methyladenosine-3'-phosphate
  modified_base 11: mod_base = OTHER; note = 2'-O-methylguanosine-3'-phosphate
  modified_base 12: mod_base = OTHER; note = 2'-O-methylguanosine-3'-phosphate
  modified_base 13: mod_base = OTHER; note = 2'-O-methyladenosine-3'-phosphate
  modified_base 14: mod_base = OTHER; note = 2'-deoxy-2'-fluorouridine-3'-phosphate
  modified_base 15: mod_base = OTHER; note = 2'-O-methyluridine-3'-phosphate
  modified_base 16: mod_base = OTHER; note = 2'-deoxy-2'-fluoroadenosine-3'-phosphate
  modified_base 17: mod_base = OTHER; note = 2'-O-methyladenosine-3'-phosphate
  modified_base 18: mod_base = OTHER; note = 2'-O-methyladenosine-3'-phosphate
  modified_base 19: mod_base = OTHER; note = 2'-O-methyladenosine-3'-phosphate
  modified_base 20: mod_base = OTHER; note = 2'-O-methyluridine-3'-phosphate
  modified_base 21: mod_base = OTHER; note = 2'-O-methylguanosine-3'-phosphorothioate
  modified_base 22: mod_base = OTHER; note = 2'-O-methyladenosine-3'-phosphorothioate
  modified_base 23: mod_base = OTHER; note = 2'-O-methylguanosine
tttagagtgaggattaaaatgag

SEQ ID NO: 308 - RNA, 21 nt, synthetic construct
  source 1..21: mol_type = other RNA
  modified_base 1: mod_base = OTHER; note = 2'-O-methyluridine-3'-phosphorothioate
  modified_base 2: mod_base = OTHER; note = 2'-O-methyluridine-3'-phosphorothioate
  modified_base 3: mod_base = OTHER; note = 2'-O-methylguanosine-3'-phosphate
  modified_base 4: mod_base = OTHER; note = 2'-O-methylguanosine-3'-phosphate
  modified_base 5: mod_base = OTHER; note = 2'-O-methylguanosine-3'-phosphate
  modified_base 6: mod_base = OTHER; note = 2'-O-docosanyl-cytidine-3'-phosphate
  modified_base 7: mod_base = OTHER; note = 2'-deoxy-2'-fluoroadenosine-3'-phosphate
  modified_base 8: mod_base = OTHER; note = 2'-O-methyladenosine-3'-phosphate
  modified_base 9: mod_base = OTHER; note = 2'-deoxy-2'-fluoroadenosine-3'-phosphate
  modified_base 10: mod_base = OTHER; note = 2'-deoxy-2'-fluoroguanosine-3'-phosphate
  modified_base 11: mod_base = OTHER; note = 2'-deoxy-2'-fluoroguanosine-3'-phosphate
  modified_base 12: mod_base = OTHER; note = 2'-O-methyluridine-3'-phosphate
  modified_base 13: mod_base = OTHER; note = 2'-O-methylguanosine-3'-phosphate
  modified_base 14: mod_base = OTHER; note = 2'-O-methylguanosine-3'-phosphate
  modified_base 15: mod_base = OTHER; note = 2'-O-methyladenosine-3'-phosphate
  modified_base 16: mod_base = OTHER; note = 2'-O-methyladenosine-3'-phosphate
  modified_base 17: mod_base = OTHER; note = 2'-O-methyladenosine-3'-phosphate
  modified_base 18: mod_base = OTHER; note = 2'-O-methyluridine-3'-phosphate
  modified_base 19: mod_base = OTHER; note = 2'-O-methylguanosine-3'-phosphorothioate
  modified_base 20: mod_base = OTHER; note = 2'-O-methyladenosine-3'-phosphorothioate
  modified_base 21: mod_base = OTHER; note = 2'-O-methyladenosine
ttgggcaaaggtggaaatgaa

SEQ ID NO: 309 - RNA, 23 nt, synthetic construct
  source 1..23: mol_type = other RNA
  modified_base 1: mod_base = OTHER; note = 2'-O-methyluridine-3'-phosphorothioate 5'-(cis-5-phenyl-3,3-dimethyl-1,2-dithiolan-4-yl (N-methylsulfonyl) phosphimidate)
  modified_base 2: mod_base = OTHER; note = 2'-deoxy-2'-fluorouridine-3'-phosphorothioate
  modified_base 3: mod_base = OTHER; note = 2'-O-methylcytidine-3'-phosphate
  modified_base 4: mod_base = OTHER; note = 2'-O-methyladenosine-3'-phosphate
  modified_base 5: mod_base = OTHER; note = 2'-O-methyluridine-3'-phosphate
  modified_base 6: mod_base = OTHER; note = 2'-deoxy-2'-fluorouridine-3'-phosphate
  modified_base 7: mod_base = OTHER; note = 2'-O-methyluridine-3'-phosphate
  modified_base 8: mod_base = OTHER; note = 2'-deoxy-2'-fluorocytidine-3'-phosphate
  modified_base 9: mod_base = OTHER; note = 2'-deoxy-2'-fluorocytidine-3'-phosphate
  modified_base 10: mod_base = OTHER; note = 2'-O-methyladenosine-3'-phosphate
  modified_base 11: mod_base = OTHER; note = 2'-O-methylcytidine-3'-phosphate
  modified_base 12: mod_base = OTHER; note = 2'-O-methylcytidine-3'-phosphate
  modified_base 13: mod_base = OTHER; note = 2'-O-methyluridine-3'-phosphate
  modified_base 14: mod_base = OTHER; note = 2'-deoxy-2'-fluorouridine-3'-phosphate
  modified_base 15: mod_base = OTHER; note = 2'-O-methyluridine-3'-phosphate
  modified_base 16: mod_base = OTHER; note = 2'-deoxy-2'-fluoroguanosine-3'-phosphate
  modified_base 17: mod_base = OTHER; note = 2'-O-methylcytidine-3'-phosphate
  modified_base 18: mod_base = OTHER; note = 2'-O-methylcytidine-3'-phosphate
  modified_base 19: mod_base = OTHER; note = 2'-O-methylcytidine-3'-phosphate
  modified_base 20: mod_base = OTHER; note = 2'-O-methyladenosine-3'-phosphate
  modified_base 21: mod_base = OTHER; note = 2'-O-methyladenosine-3'-phosphorothioate
  modified_base 22: mod_base = OTHER; note = 2'-O-methylguanosine-3'-phosphorothioate
  modified_base 23: mod_base = OTHER; note = 2'-O-methylcytidine
ttcatttccacctttgcccaagc

SEQ ID NO: 310 - RNA, 21 nt, synthetic construct
  source 1..21: mol_type = other RNA
  modified_base 1: mod_base = OTHER; note = 2'-O-methylcytidine-3'-phosphorothioate
  modified_base 2: mod_base = OTHER; note = 2'-O-methyladenosine-3'-phosphorothioate
  modified_base 3: mod_base = OTHER; note = 2'-O-methylcytidine-3'-phosphate
  modified_base 4: mod_base = OTHER; note = 2'-O-methyladenosine-3'-phosphate
  modified_base 5: mod_base = OTHER; note = 2'-O-methylguanosine-3'-phosphate
  modified_base 6: mod_base = OTHER; note = 2'-O-methyladenosine-3'-phosphate
  modified_base 7: mod_base = OTHER; note = 2'-deoxy-2'-fluoroadenosine-3'-phosphate
  modified_base 8: mod_base = OTHER; note = 2'-O-methyladenosine-3'-phosphate
  modified_base 9: mod_base = OTHER; note = 2'-deoxy-2'-fluorocytidine-3'-phosphate
  modified_base 10: mod_base = OTHER; note = 2'-deoxy-2'-fluorouridine-3'-phosphate
  modified_base 11: mod_base = OTHER; note = 2'-deoxy-2'-fluorocytidine-3'-phosphate
  modified_base 12: mod_base = OTHER; note = 2'-O-methyladenosine-3'-phosphate
  modified_base 13: mod_base = OTHER; note = 2'-O-methyladenosine-3'-phosphate
  modified_base 14: mod_base = OTHER; note = 2'-O-methyluridine-3'-phosphate
  modified_base 15: mod_base = OTHER; note = 2'-O-methyladenosine-3'-phosphate
  modified_base 16: mod_base = OTHER; note = 2'-O-methyladenosine-3'-phosphate
  modified_base 17: mod_base = OTHER; note = 2'-O-methyladenosine-3'-phosphate
  modified_base 18: mod_base = OTHER; note = 2'-O-methylguanosine-3'-phosphate
  modified_base 19: mod_base = OTHER; note = 2'-O-methyluridine-3'-phosphate
  modified_base 20: mod_base = OTHER; note = 2'-O-methylguanosine-3'-phosphate
  modified_base 21: mod_base = OTHER; note = 2'-O-methyladenosine-3'-phosphate ((2S,4R)-1-[29-[[2-(acetylamino)-2-deoxy-beta-D-galactopyra nosyl]oxy]-14,14-bis[[3-[[3-[[5-[[2-(acetylamino)-2-deoxy-b eta-D-galactopyranosyl]oxy]-1-oxopentyl]amino]propyl]amino] -3-oxopropoxy]methyl]-1,12,19,25-tetraoxo-16-oxa-13,20,24-t riazanonacos-1-yl]-4-hydroxy-2-pyrrolidinyl)methyl ester
cacagaaactcaataaagtga

SEQ ID NO: 311 - RNA, 23 nt, synthetic construct
  source 1..23: mol_type = other RNA
  modified_base 1: mod_base = OTHER; note = 2'-O-methyluridine-3'-phosphorothioate 5'-(E)-Vinylphosphonate
  modified_base 2: mod_base = OTHER; note = 2'-deoxy-2'-fluorocytidine-3'-phosphorothioate
  modified_base 3: mod_base = OTHER; note = 2'-O-methyladenosine-3'-phosphate
  modified_base 4: mod_base = OTHER; note = 2'-O-methylcytidine-3'-phosphate
  modified_base 5: mod_base = OTHER; note = 2'-O-methyluridine-3'-phosphate
  modified_base 6: mod_base = OTHER; note = 2'-deoxy-2'-fluorouridine-3'-phosphate
  modified_base 7: mod_base = OTHER; note = 2'-O-methyluridine-3'-phosphate
  modified_base 8: mod_base = OTHER; note = 2'-deoxy-2'-fluoroadenosine-3'-phosphate
  modified_base 9: mod_base = OTHER; note = 2'-deoxy-2'-fluorouridine-3'-phosphate
  modified_base 10: mod_base = OTHER; note = 2'-O-methyluridine-3'-phosphate
  modified_base 11: mod_base = OTHER; note = 2'-O-methylguanosine-3'-phosphate
  modified_base 12: mod_base = OTHER; note = 2'-O-methyladenosine-3'-phosphate
  modified_base 13: mod_base = OTHER; note = 2'-O-methylguanosine-3'-phosphate
  modified_base 14: mod_base = OTHER; note = 2'-deoxy-2'-fluorouridine-3'-phosphate
  modified_base 15: mod_base = OTHER; note = 2'-O-methyluridine-3'-phosphate
  modified_base 16: mod_base = OTHER; note = 2'-deoxy-2'-fluorouridine-3'-phosphate
  modified_base 17: mod_base = OTHER; note = 2'-O-methylcytidine-3'-phosphate
  modified_base 18: mod_base = OTHER; note = 2'-O-methyluridine-3'-phosphate
  modified_base 19: mod_base = OTHER; note = 2'-O-methylguanosine-3'-phosphate
  modified_base 20: mod_base = OTHER; note = 2'-O-methyluridine-3'-phosphate
  modified_base 21: mod_base = OTHER; note = 2'-O-methylguanosine-3'-phosphorothioate
  modified_base 22: mod_base = OTHER; note = 2'-O-methylcytidine-3'-phosphorothioate
  modified_base 23: mod_base = OTHER; note = 2'-O-methylcytidine
tcactttattgagtttctgtgcc

SEQ ID NO: 312 - RNA, 21 nt, synthetic construct
  source 1..21: mol_type = other RNA
  modified_base 1: mod_base = OTHER; note = 2'-O-methylcytidine-3'-phosphorothioate
  modified_base 2: mod_base = OTHER; note = 2'-O-methyladenosine-3'-phosphorothioate
  modified_base 3: mod_base = OTHER; note = 2'-O-methylcytidine-3'-phosphate
  modified_base 4: mod_base = OTHER; note = 2'-O-methyladenosine-3'-phosphate
  modified_base 5: mod_base = OTHER; note = 2'-O-methylguanosine-3'-phosphate
  modified_base 6: mod_base = OTHER; note = 2'-O-methyladenosine-3'-phosphate
  modified_base 7: mod_base = OTHER; note = 2'-deoxy-2'-fluoroadenosine-3'-phosphate
  modified_base 8: mod_base = OTHER; note = 2'-O-methyladenosine-3'-phosphate
  modified_base 9: mod_base = OTHER; note = 2'-deoxy-2'-fluorocytidine-3'-phosphate
  modified_base 10: mod_base = OTHER; note = 2'-deoxy-2'-fluorouridine-3'-phosphate
  modified_base 11: mod_base = OTHER; note = 2'-deoxy-2'-fluorocytidine-3'-phosphate
  modified_base 12: mod_base = OTHER; note = 2'-O-methyladenosine-3'-phosphate
  modified_base 13: mod_base = OTHER; note = 2'-O-methyladenosine-3'-phosphate
  modified_base 14: mod_base = OTHER; note = 2'-O-methyluridine-3'-phosphate
  modified_base 15: mod_base = OTHER; note = 2'-O-methyladenosine-3'-phosphate
  modified_base 16: mod_base = OTHER; note = 2'-O-methyladenosine-3'-phosphate
  modified_base 17: mod_base = OTHER; note = 2'-O-methyladenosine-3'-phosphate
  modified_base 18: mod_base = OTHER; note = 2'-O-methylguanosine-3'-phosphate
  modified_base 19: mod_base = OTHER; note = 2'-O-methyluridine-3'-phosphate
  modified_base 20: mod_base = OTHER; note = 2'-O-methylguanosine-3'-phosphate
  modified_base 21: mod_base = OTHER; note = 2'-O-methyladenosine-3'-phosphate ((2S,4R)-1-[29-[[2-(acetylamino)-2-deoxy-beta-D-galactopyra nosyl]oxy]-14,14-bis[[3-[[3-[[5-[[2-(acetylamino)-2-deoxy-b eta-D-galactopyranosyl]oxy]-1-oxopentyl]amino]propyl]amino] -3-oxopropoxy]methyl]-1,12,19,25-tetraoxo-16-oxa-13,20,24-t riazanonacos-1-yl]-4-hydroxy-2-pyrrolidinyl)methyl ester
cacagaaactcaataaagtga

SEQ ID NO: 313 - RNA, 23 nt, synthetic construct
  source 1..23: mol_type = other RNA
  modified_base 1: mod_base = OTHER; note = 2'-O-methyluridine-3'-phosphorothioate 5'-(cis-5-(2,4-difluorophenyl)-3,3-dimethyl-1,2-dithiolan-4 -yl thiophosphate)
  modified_base 2: mod_base = OTHER; note = 2'-deoxy-2'-fluorocytidine-3'-phosphorothioate
  modified_base 3: mod_base = OTHER; note = 2'-O-methyladenosine-3'-phosphate
  modified_base 4: mod_base = OTHER; note = 2'-O-methylcytidine-3'-phosphate
  modified_base 5: mod_base = OTHER; note = 2'-O-methyluridine-3'-phosphate
  modified_base 6: mod_base = OTHER; note = 2'-deoxy-2'-fluorouridine-3'-phosphate
  modified_base 7: mod_base = OTHER; note = 2'-O-methyluridine-3'-phosphate
  modified_base 8: mod_base = OTHER; note = 2'-deoxy-2'-fluoroadenosine-3'-phosphate
  modified_base 9: mod_base = OTHER; note = 2'-deoxy-2'-fluorouridine-3'-phosphate
  modified_base 10: mod_base = OTHER; note = 2'-O-methyluridine-3'-phosphate
  modified_base 11: mod_base = OTHER; note = 2'-O-methylguanosine-3'-phosphate
  modified_base 12: mod_base = OTHER; note = 2'-O-methyladenosine-3'-phosphate
  modified_base 13: mod_base = OTHER; note = 2'-O-methylguanosine-3'-phosphate
  modified_base 14: mod_base = OTHER; note = 2'-deoxy-2'-fluorouridine-3'-phosphate
  modified_base 15: mod_base = OTHER; note = 2'-O-methyluridine-3'-phosphate
  modified_base 16: mod_base = OTHER; note = 2'-deoxy-2'-fluorouridine-3'-phosphate
  modified_base 17: mod_base = OTHER; note = 2'-O-methylcytidine-3'-phosphate
  modified_base 18: mod_base = OTHER; note = 2'-O-methyluridine-3'-phosphate
  modified_base 19: mod_base = OTHER; note = 2'-O-methylguanosine-3'-phosphate
  modified_base 20: mod_base = OTHER; note = 2'-O-methyluridine-3'-phosphate
  modified_base 21: mod_base = OTHER; note = 2'-O-methylguanosine-3'-phosphorothioate
  modified_base 22: mod_base = OTHER; note = 2'-O-methylcytidine-3'-phosphorothioate
  modified_base 23: mod_base = OTHER; note = 2'-O-methylcytidine
tcactttattgagtttctgtgcc

SEQ ID NO: 314 - RNA, 21 nt, synthetic construct
  source 1..21: mol_type = other RNA
  modified_base 1: mod_base = OTHER; note = 2'-O-methylcytidine-3'-phosphorothioate
  modified_base 2: mod_base = OTHER; note = 2'-O-methyladenosine-3'-phosphorothioate
  modified_base 3: mod_base = OTHER; note = 2'-O-methylcytidine-3'-phosphate
  modified_base 4: mod_base = OTHER; note = 2'-O-methyladenosine-3'-phosphate
  modified_base 5: mod_base = OTHER; note = 2'-O-methylguanosine-3'-phosphate
  modified_base 6: mod_base = OTHER; note = 2'-O-methyladenosine-3'-phosphate
  modified_base 7: mod_base = OTHER; note = 2'-deoxy-2'-fluoroadenosine-3'-phosphate
  modified_base 8: mod_base = OTHER; note = 2'-O-methyladenosine-3'-phosphate
  modified_base 9: mod_base = OTHER; note = 2'-deoxy-2'-fluorocytidine-3'-phosphate
  modified_base 10: mod_base = OTHER; note = 2'-deoxy-2'-fluorouridine-3'-phosphate
  modified_base 11: mod_base = OTHER; note = 2'-deoxy-2'-fluorocytidine-3'-phosphate
  modified_base 12: mod_base = OTHER; note = 2'-O-methyladenosine-3'-phosphate
  modified_base 13: mod_base = OTHER; note = 2'-O-methyladenosine-3'-phosphate
  modified_base 14: mod_base = OTHER; note = 2'-O-methyluridine-3'-phosphate
  modified_base 15: mod_base = OTHER; note = 2'-O-methyladenosine-3'-phosphate
  modified_base 16: mod_base = OTHER; note = 2'-O-methyladenosine-3'-phosphate
  modified_base 17: mod_base = OTHER; note = 2'-O-methyladenosine-3'-phosphate
  modified_base 18: mod_base = OTHER; note = 2'-O-methylguanosine-3'-phosphate
  modified_base 19: mod_base = OTHER; note = 2'-O-methyluridine-3'-phosphate
  modified_base 20: mod_base = OTHER; note = 2'-O-methylguanosine-3'-phosphate
  modified_base 21: mod_base = OTHER; note = 2'-O-methyladenosine-3'-phosphate ((2S,4R)-1-[29-[[2-(acetylamino)-2-deoxy-beta-D-galactopyra nosyl]oxy]-14,14-bis[[3-[[3-[[5-[[2-(acetylamino)-2-deoxy-b eta-D-galactopyranosyl]oxy]-1-oxopentyl]amino]propyl]amino] -3-oxopropoxy]methyl]-1,12,19,25-tetraoxo-16-oxa-13,20,24-t riazanonacos-1-yl]-4-hydroxy-2-pyrrolidinyl)methyl ester
cacagaaactcaataaagtga

SEQ ID NO: 315 - RNA, 23 nt, synthetic construct
  source 1..23: mol_type = other RNA
  modified_base 1: mod_base = OTHER; note = 2'-O-methyluridine-3'-phosphorothioate 5'-(cis-5-(4-trifluoromethylphenyl)-3,3-dimethyl-1,2-dithio lan-4-yl thiophosphate)
  modified_base 2: mod_base = OTHER; note = 2'-deoxy-2'-fluorocytidine-3'-phosphorothioate
  modified_base 3: mod_base = OTHER; note = 2'-O-methyladenosine-3'-phosphate
  modified_base 4: mod_base = OTHER; note = 2'-O-methylcytidine-3'-phosphate
  modified_base 5: mod_base = OTHER; note = 2'-O-methyluridine-3'-phosphate
  modified_base 6: mod_base = OTHER; note = 2'-deoxy-2'-fluorouridine-3'-phosphate
  modified_base 7: mod_base = OTHER; note = 2'-O-methyluridine-3'-phosphate
  modified_base 8: mod_base = OTHER; note = 2'-deoxy-2'-fluoroadenosine-3'-phosphate
  modified_base 9: mod_base = OTHER; note = 2'-deoxy-2'-fluorouridine-3'-phosphate
  modified_base 10: mod_base = OTHER; note = 2'-O-methyluridine-3'-phosphate
  modified_base 11: mod_base = OTHER; note = 2'-O-methylguanosine-3'-phosphate
  modified_base 12: mod_base = OTHER; note = 2'-O-methyladenosine-3'-phosphate
  modified_base 13: mod_base = OTHER; note = 2'-O-methylguanosine-3'-phosphate
  modified_base 14: mod_base = OTHER; note = 2'-deoxy-2'-fluorouridine-3'-phosphate
  modified_base 15: mod_base = OTHER; note = 2'-O-methyluridine-3'-phosphate
  modified_base 16: mod_base = OTHER; note = 2'-deoxy-2'-fluorouridine-3'-phosphate
  modified_base 17: mod_base = OTHER; note = 2'-O-methylcytidine-3'-phosphate
  modified_base 18: mod_base = OTHER; note = 2'-O-methyluridine-3'-phosphate
  modified_base 19: mod_base = OTHER; note = 2'-O-methylguanosine-3'-phosphate
  modified_base 20: mod_base = OTHER; note = 2'-O-methyluridine-3'-phosphate
  modified_base 21: mod_base = OTHER; note = 2'-O-methylguanosine-3'-phosphorothioate
  modified_base 22: mod_base = OTHER; note = 2'-O-methylcytidine-3'-phosphorothioate
  modified_base 23: mod_base = OTHER; note = 2'-O-methylcytidine
tcactttattgagtttctgtgcc

SEQ ID NO: 316 - RNA, 21 nt, synthetic construct
  source 1..21: mol_type = other RNA
  modified_base 1: mod_base = OTHER; note = 2'-O-methylcytidine-3'-phosphorothioate
  modified_base 2: mod_base = OTHER; note = 2'-O-methyladenosine-3'-phosphorothioate
  modified_base 3: mod_base = OTHER; note = 2'-O-methylcytidine-3'-phosphate
  modified_base 4: mod_base = OTHER; note = 2'-O-methyladenosine-3'-phosphate
  modified_base 5: mod_base = OTHER; note = 2'-O-methylguanosine-3'-phosphate
  modified_base 6: mod_base = OTHER; note = 2'-O-methyladenosine-3'-phosphate
  modified_base 7: mod_base = OTHER; note = 2'-deoxy-2'-fluoroadenosine-3'-phosphate
  modified_base 8: mod_base = OTHER; note = 2'-O-methyladenosine-3'-phosphate
  modified_base 9: mod_base = OTHER; note = 2'-deoxy-2'-fluorocytidine-3'-phosphate
  modified_base 10: mod_base = OTHER; note = 2'-deoxy-2'-fluorouridine-3'-phosphate
  modified_base 11: mod_base = OTHER; note = 2'-deoxy-2'-fluorocytidine-3'-phosphate
  modified_base 12: mod_base = OTHER; note = 2'-O-methyladenosine-3'-phosphate
  modified_base 13: mod_base = OTHER; note = 2'-O-methyladenosine-3'-phosphate
  modified_base 14: mod_base = OTHER; note = 2'-O-methyluridine-3'-phosphate
  modified_base 15: mod_base = OTHER; note = 2'-O-methyladenosine-3'-phosphate
  modified_base 16: mod_base = OTHER; note = 2'-O-methyladenosine-3'-phosphate
  modified_base 17: mod_base = OTHER; note = 2'-O-methyladenosine-3'-phosphate
  modified_base 18: mod_base = OTHER; note = 2'-O-methylguanosine-3'-phosphate
  modified_base 19: mod_base = OTHER; note = 2'-O-methyluridine-3'-phosphate
  modified_base 20: mod_base = OTHER; note = 2'-O-methylguanosine-3'-phosphate
  modified_base 21: mod_base = OTHER; note = 2'-O-methyladenosine-3'-phosphate ((2S,4R)-1-[29-[[2-(acetylamino)-2-deoxy-beta-D-galactopyra nosyl]oxy]-14,14-bis[[3-[[3-[[5-[[2-(acetylamino)-2-deoxy-b eta-D-galactopyranosyl]oxy]-1-oxopentyl]amino]propyl]amino] -3-oxopropoxy]methyl]-1,12,19,25-tetraoxo-16-oxa-13,20,24-t riazanonacos-1-yl]-4-hydroxy-2-pyrrolidinyl)methyl ester
cacagaaactcaataaagtga

SEQ ID NO: 317 - RNA, 23 nt, synthetic construct
  source 1..23: mol_type = other RNA
  modified_base 1: mod_base = OTHER; note = 2'-O-methyluridine-3'-phosphorothioate 5'-(cis-5-(3-methoxyphenyl)-3,3-dimethyl-1,2-dithiolan-4-yl thiophosphate)
  modified_base 2: mod_base = OTHER; note = 2'-deoxy-2'-fluorocytidine-3'-phosphorothioate
  modified_base 3: mod_base = OTHER; note = 2'-O-methyladenosine-3'-phosphate
  modified_base 4: mod_base = OTHER; note = 2'-O-methylcytidine-3'-phosphate
  modified_base 5: mod_base = OTHER; note = 2'-O-methyluridine-3'-phosphate
  modified_base 6: mod_base = OTHER; note = 2'-deoxy-2'-fluorouridine-3'-phosphate
  modified_base 7: mod_base = OTHER; note = 2'-O-methyluridine-3'-phosphate
  modified_base 8: mod_base = OTHER; note = 2'-deoxy-2'-fluoroadenosine-3'-phosphate
  modified_base 9: mod_base = OTHER; note = 2'-deoxy-2'-fluorouridine-3'-phosphate
  modified_base 10: mod_base = OTHER; note = 2'-O-methyluridine-3'-phosphate
  modified_base 11: mod_base = OTHER; note = 2'-O-methylguanosine-3'-phosphate
  modified_base 12: mod_base = OTHER; note = 2'-O-methyladenosine-3'-phosphate
  modified_base 13: mod_base = OTHER; note = 2'-O-methylguanosine-3'-phosphate
  modified_base 14: mod_base = OTHER; note = 2'-deoxy-2'-fluorouridine-3'-phosphate
  modified_base 15: mod_base = OTHER; note = 2'-O-methyluridine-3'-phosphate
  modified_base 16: mod_base = OTHER; note = 2'-deoxy-2'-fluorouridine-3'-phosphate
  modified_base 17: mod_base = OTHER; note = 2'-O-methylcytidine-3'-phosphate
  modified_base 18: mod_base = OTHER; note = 2'-O-methyluridine-3'-phosphate
  modified_base 19: mod_base = OTHER; note = 2'-O-methylguanosine-3'-phosphate
  modified_base 20: mod_base = OTHER; note = 2'-O-methyluridine-3'-phosphate
  modified_base 21: mod_base = OTHER; note = 2'-O-methylguanosine-3'-phosphorothioate
  modified_base 22: mod_base = OTHER; note = 2'-O-methylcytidine-3'-phosphorothioate
  modified_base 23: mod_base = OTHER; note = 2'-O-methylcytidine
tcactttattgagtttctgtgcc

SEQ ID NO: 318 - RNA, 21 nt, synthetic construct
  source 1..21: mol_type = other RNA
  modified_base 1: mod_base = OTHER; note = 2'-O-methylcytidine-3'-phosphorothioate
  modified_base 2: mod_base = OTHER; note = 2'-O-methyladenosine-3'-phosphorothioate
  modified_base 3: mod_base = OTHER; note = 2'-O-methylcytidine-3'-phosphate
  modified_base 4: mod_base = OTHER; note = 2'-O-methyladenosine-3'-phosphate
  modified_base 5: mod_base = OTHER; note = 2'-O-methylguanosine-3'-phosphate
  modified_base 6: mod_base = OTHER; note = 2'-O-methyladenosine-3'-phosphate
  modified_base 7: mod_base = OTHER; note = 2'-deoxy-2'-fluoroadenosine-3'-phosphate
  modified_base 8: mod_base = OTHER; note = 2'-O-methyladenosine-3'-phosphate
  modified_base 9: mod_base = OTHER; note = 2'-deoxy-2'-fluorocytidine-3'-phosphate
  modified_base 10: mod_base = OTHER; note = 2'-deoxy-2'-fluorouridine-3'-phosphate
  modified_base 11: mod_base = OTHER; note = 2'-deoxy-2'-fluorocytidine-3'-phosphate
  modified_base 12: mod_base = OTHER; note = 2'-O-methyladenosine-3'-phosphate
  modified_base 13: mod_base = OTHER; note = 2'-O-methyladenosine-3'-phosphate
  modified_base 14: mod_base = OTHER; note = 2'-O-methyluridine-3'-phosphate
  modified_base 15: mod_base = OTHER; note = 2'-O-methyladenosine-3'-phosphate
  modified_base 16: mod_base = OTHER; note = 2'-O-methyladenosine-3'-phosphate
  modified_base 17: mod_base = OTHER; note = 2'-O-methyladenosine-3'-phosphate
  modified_base 18: mod_base = OTHER; note = 2'-O-methylguanosine-3'-phosphate
  modified_base 19: mod_base = OTHER; note = 2'-O-methyluridine-3'-phosphate
  modified_base 20: mod_base = OTHER; note = 2'-O-methylguanosine-3'-phosphate
  modified_base 21: mod_base = OTHER; note = 2'-O-methyladenosine-3'-phosphate ((2S,4R)-1-[29-[[2-(acetylamino)-2-deoxy-beta-D-galactopyra nosyl]oxy]-14,14-bis[[3-[[3-[[5-[[2-(acetylamino)-2-deoxy-b eta-D-galactopyranosyl]oxy]-1-oxopentyl]amino]propyl]amino] -3-oxopropoxy]methyl]-1,12,19,25-tetraoxo-16-oxa-13,20,24-t riazanonacos-1-yl]-4-hydroxy-2-pyrrolidinyl)methyl ester
cacagaaactcaataaagtga

SEQ ID NO: 319 - RNA, 23 nt, synthetic construct
  source 1..23: mol_type = other RNA
  modified_base 1: mod_base = OTHER; note = 2'-O-methyluridine-3'-phosphorothioate 5'-(cis-5-ethyl-3,3-dimethyl-1,2-dithiolan-4-yl thiophosphate)
  modified_base 2: mod_base = OTHER; note = 2'-deoxy-2'-fluorocytidine-3'-phosphorothioate
  modified_base 3: mod_base = OTHER; note = 2'-O-methyladenosine-3'-phosphate
  modified_base 4: mod_base = OTHER; note = 2'-O-methylcytidine-3'-phosphate
  modified_base 5: mod_base = OTHER; note = 2'-O-methyluridine-3'-phosphate
  modified_base 6: mod_base = OTHER; note = 2'-deoxy-2'-fluorouridine-3'-phosphate
  modified_base 7: mod_base = OTHER; note = 2'-O-methyluridine-3'-phosphate
  modified_base 8: mod_base = OTHER; note = 2'-deoxy-2'-fluoroadenosine-3'-phosphate
  modified_base 9: mod_base = OTHER; note = 2'-deoxy-2'-fluorouridine-3'-phosphate
  modified_base 10: mod_base = OTHER; note = 2'-O-methyluridine-3'-phosphate
  modified_base 11: mod_base = OTHER; note = 2'-O-methylguanosine-3'-phosphate
  modified_base 12: mod_base = OTHER; note = 2'-O-methyladenosine-3'-phosphate
  modified_base 13: mod_base = OTHER; note = 2'-O-methylguanosine-3'-phosphate
  modified_base 14: mod_base = OTHER; note = 2'-deoxy-2'-fluorouridine-3'-phosphate
  modified_base 15: mod_base = OTHER; note = 2'-O-methyluridine-3'-phosphate
  modified_base 16: mod_base = OTHER; note = 2'-deoxy-2'-fluorouridine-3'-phosphate
  modified_base 17: mod_base = OTHER; note = 2'-O-methylcytidine-3'-phosphate
  modified_base 18: mod_base = OTHER; note = 2'-O-methyluridine-3'-phosphate
  modified_base 19: mod_base = OTHER; note = 2'-O-methylguanosine-3'-phosphate
  modified_base 20: mod_base = OTHER; note = 2'-O-methyluridine-3'-phosphate
  modified_base 21: mod_base = OTHER; note = 2'-O-methylguanosine-3'-phosphorothioate
  modified_base 22: mod_base = OTHER; note = 2'-O-methylcytidine-3'-phosphorothioate
  modified_base 23: mod_base = OTHER; note = 2'-O-methylcytidine
tcactttattgagtttctgtgcc

SEQ ID NO: 320 - RNA, 21 nt, synthetic construct
  source 1..21: mol_type = other RNA
  modified_base 1: mod_base = OTHER; note = 2'-O-methylcytidine-3'-phosphorothioate
  modified_base 2: mod_base = OTHER; note = 2'-O-methyladenosine-3'-phosphorothioate
  modified_base 3: mod_base = OTHER; note = 2'-O-methylcytidine-3'-phosphate
  modified_base 4: mod_base = OTHER; note = 2'-O-methyladenosine-3'-phosphate
  modified_base 5: mod_base = OTHER; note = 2'-O-methylguanosine-3'-phosphate
  modified_base 6: mod_base = OTHER; note = 2'-O-methyladenosine-3'-phosphate
  modified_base 7: mod_base = OTHER; note = 2'-deoxy-2'-fluoroadenosine-3'-phosphate
  modified_base 8: mod_base = OTHER; note = 2'-O-methyladenosine-3'-phosphate
  modified_base 9: mod_base = OTHER; note = 2'-deoxy-2'-fluorocytidine-3'-phosphate
  modified_base 10: mod_base = OTHER; note = 2'-deoxy-2'-fluorouridine-3'-phosphate
  modified_base 11: mod_base = OTHER; note = 2'-deoxy-2'-fluorocytidine-3'-phosphate
  modified_base 12: mod_base = OTHER; note = 2'-O-methyladenosine-3'-phosphate
  modified_base 13: mod_base = OTHER; note = 2'-O-methyladenosine-3'-phosphate
  modified_base 14: mod_base = OTHER; note = 2'-O-methyluridine-3'-phosphate
  modified_base 15: mod_base = OTHER; note = 2'-O-methyladenosine-3'-phosphate
  modified_base 16: mod_base = OTHER; note = 2'-O-methyladenosine-3'-phosphate
  modified_base 17: mod_base = OTHER; note = 2'-O-methyladenosine-3'-phosphate
  modified_base 18: mod_base = OTHER; note = 2'-O-methylguanosine-3'-phosphate
  modified_base 19: mod_base = OTHER; note = 2'-O-methyluridine-3'-phosphate
  modified_base 20: mod_base = OTHER; note = 2'-O-methylguanosine-3'-phosphate
  modified_base 21: mod_base = OTHER; note = 2'-O-methyladenosine-3'-phosphate ((2S,4R)-1-[29-[[2-(acetylamino)-2-deoxy-beta-D-galactopyra nosyl]oxy]-14,14-bis[[3-[[3-[[5-[[2-(acetylamino)-2-deoxy-b eta-D-galactopyranosyl]oxy]-1-oxopentyl]amino]propyl]amino] -3-oxopropoxy]methyl]-1,12,19,25-tetraoxo-16-oxa-13,20,24-t riazanonacos-1-yl]-4-hydroxy-2-pyrrolidinyl)methyl ester
cacagaaactcaataaagtga

SEQ ID NO: 321 - RNA, 23 nt, synthetic construct
  source 1..23: mol_type = other RNA
  modified_base 1: mod_base = OTHER; note = 2'-O-methyluridine-3'-phosphorothioate 5'-(cis-5-isopropyl-3,3-dimethyl-1,2-dithiolan-4-yl thiophosphate)
  modified_base 2: mod_base = OTHER; note = 2'-deoxy-2'-fluorocytidine-3'-phosphorothioate
  modified_base 3: mod_base = OTHER; note = 2'-O-methyladenosine-3'-phosphate
  modified_base 4: mod_base = OTHER; note = 2'-O-methylcytidine-3'-phosphate
  modified_base 5: mod_base = OTHER; note = 2'-O-methyluridine-3'-phosphate
  modified_base 6: mod_base = OTHER; note = 2'-deoxy-2'-fluorouridine-3'-phosphate
  modified_base 7: mod_base = OTHER; note = 2'-O-methyluridine-3'-phosphate
  modified_base 8: mod_base = OTHER; note = 2'-deoxy-2'-fluoroadenosine-3'-phosphate
  modified_base 9: mod_base = OTHER; note = 2'-deoxy-2'-fluorouridine-3'-phosphate
  modified_base 10: mod_base = OTHER; note = 2'-O-methyluridine-3'-phosphate
  modified_base 11: mod_base = OTHER; note = 2'-O-methylguanosine-3'-phosphate
  modified_base 12: mod_base = OTHER; note = 2'-O-methyladenosine-3'-phosphate
  modified_base 13: mod_base = OTHER; note = 2'-O-methylguanosine-3'-phosphate
  modified_base 14: mod_base = OTHER; note = 2'-deoxy-2'-fluorouridine-3'-phosphate
  modified_base 15: mod_base = OTHER; note = 2'-O-methyluridine-3'-phosphate
  modified_base 16: mod_base = OTHER; note = 2'-deoxy-2'-fluorouridine-3'-phosphate
  modified_base 17: mod_base = OTHER; note = 2'-O-methylcytidine-3'-phosphate
  modified_base 18: mod_base = OTHER; note = 2'-O-methyluridine-3'-phosphate
  modified_base 19: mod_base = OTHER; note = 2'-O-methylguanosine-3'-phosphate
  modified_base 20: mod_base = OTHER; note = 2'-O-methyluridine-3'-phosphate
  modified_base 21: mod_base = OTHER; note = 2'-O-methylguanosine-3'-phosphorothioate
  modified_base 22: mod_base = OTHER; note = 2'-O-methylcytidine-3'-phosphorothioate
  modified_base 23: mod_base = OTHER; note = 2'-O-methylcytidine
tcactttattgagtttctgtgcc

SEQ ID NO: 322 - RNA, 21 nt, synthetic construct
  source 1..21: mol_type = other RNA
  modified_base 1: mod_base = OTHER; note = 2'-O-methylcytidine-3'-phosphorothioate
  modified_base 2: mod_base = OTHER; note = 2'-O-methyladenosine-3'-phosphorothioate
  modified_base 3: mod_base = OTHER; note = 2'-O-methylcytidine-3'-phosphate
  modified_base 4: mod_base = OTHER; note = 2'-O-methyladenosine-3'-phosphate
  modified_base 5: mod_base = OTHER; note = 2'-O-methylguanosine-3'-phosphate
  modified_base 6: mod_base = OTHER; note = 2'-O-methyladenosine-3'-phosphate
  modified_base 7: mod_base = OTHER; note = 2'-deoxy-2'-fluoroadenosine-3'-phosphate
  modified_base 8: mod_base = OTHER; note = 2'-O-methyladenosine-3'-phosphate
  modified_base 9: mod_base = OTHER; note = 2'-deoxy-2'-fluorocytidine-3'-phosphate
  modified_base 10: mod_base = OTHER; note = 2'-deoxy-2'-fluorouridine-3'-phosphate
  modified_base 11: mod_base = OTHER; note = 2'-deoxy-2'-fluorocytidine-3'-phosphate
  modified_base 12: mod_base = OTHER; note = 2'-O-methyladenosine-3'-phosphate
  modified_base 13: mod_base = OTHER; note = 2'-O-methyladenosine-3'-phosphate
  modified_base 14: mod_base = OTHER; note = 2'-O-methyluridine-3'-phosphate
  modified_base 15: mod_base = OTHER; note = 2'-O-methyladenosine-3'-phosphate
  modified_base 16: mod_base = OTHER; note = 2'-O-methyladenosine-3'-phosphate
  modified_base 17: mod_base = OTHER; note = 2'-O-methyladenosine-3'-phosphate
  modified_base 18: mod_base = OTHER; note = 2'-O-methylguanosine-3'-phosphate
  modified_base 19: mod_base = OTHER; note = 2'-O-methyluridine-3'-phosphate
  modified_base 20: mod_base = OTHER; note = 2'-O-methylguanosine-3'-phosphate
  modified_base 21: mod_base = OTHER; note = 2'-O-methyladenosine-3'-phosphate ((2S,4R)-1-[29-[[2-(acetylamino)-2-deoxy-beta-D-galactopyra nosyl]oxy]-14,14-bis[[3-[[3-[[5-[[2-(acetylamino)-2-deoxy-b eta-D-galactopyranosyl]oxy]-1-oxopentyl]amino]propyl]amino] -3-oxopropoxy]methyl]-1,12,19,25-tetraoxo-16-oxa-13,20,24-t riazanonacos-1-yl]-4-hydroxy-2-pyrrolidinyl)methyl ester
cacagaaactcaataaagtga

SEQ ID NO: 323 - RNA, 23 nt, synthetic construct
  source 1..23: mol_type = other RNA
  modified_base 1: mod_base = OTHER; note = 2'-O-methyluridine-3'-phosphorothioate 5'-(cis-3-phenyl-1,2-dithiaspiro[4.3]octan-4-yl thiophosphate)
  modified_base 2: mod_base = OTHER; note = 2'-deoxy-2'-fluorocytidine-3'-phosphorothioate
  modified_base 3: mod_base = OTHER; note = 2'-O-methyladenosine-3'-phosphate
  modified_base 4: mod_base = OTHER; note = 2'-O-methylcytidine-3'-phosphate
  modified_base 5: mod_base = OTHER; note = 2'-O-methyluridine-3'-phosphate
  modified_base 6: mod_base = OTHER; note = 2'-deoxy-2'-fluorouridine-3'-phosphate
  modified_base 7: mod_base = OTHER; note = 2'-O-methyluridine-3'-phosphate
  modified_base 8: mod_base = OTHER; note = 2'-deoxy-2'-fluoroadenosine-3'-phosphate
  modified_base 9: mod_base = OTHER; note = 2'-deoxy-2'-fluorouridine-3'-phosphate
  modified_base 10: mod_base = OTHER; note = 2'-O-methyluridine-3'-phosphate
  modified_base 11: mod_base = OTHER; note = 2'-O-methylguanosine-3'-phosphate
  modified_base 12: mod_base = OTHER; note = 2'-O-methyladenosine-3'-phosphate
  modified_base 13: mod_base = OTHER; note = 2'-O-methylguanosine-3'-phosphate
  modified_base 14: mod_base = OTHER; note = 2'-deoxy-2'-fluorouridine-3'-phosphate
  modified_base 15: mod_base = OTHER; note = 2'-O-methyluridine-3'-phosphate
  modified_base 16: mod_base = OTHER; note = 2'-deoxy-2'-fluorouridine-3'-phosphate
  modified_base 17: mod_base = OTHER; note = 2'-O-methylcytidine-3'-phosphate
  modified_base 18: mod_base = OTHER; note = 2'-O-methyluridine-3'-phosphate
  modified_base 19: mod_base = OTHER; note = 2'-O-methylguanosine-3'-phosphate
  modified_base 20: mod_base = OTHER; note = 2'-O-methyluridine-3'-phosphate
  modified_base 21: mod_base = OTHER; note = 2'-O-methylguanosine-3'-phosphorothioate
  modified_base 22: mod_base = OTHER; note = 2'-O-methylcytidine-3'-phosphorothioate
  modified_base 23: mod_base = OTHER; note = 2'-O-methylcytidine
tcactttattgagtttctgtgcc

SEQ ID NO: 324 - RNA, 21 nt, synthetic construct
  source 1..21: mol_type = other RNA
  modified_base 1: mod_base = OTHER; note = 2'-O-methylcytidine-3'-phosphorothioate
  modified_base 2: mod_base = OTHER; note = 2'-O-methyladenosine-3'-phosphorothioate
  modified_base 3: mod_base = OTHER; note = 2'-O-methylcytidine-3'-phosphate
  modified_base 4: mod_base = OTHER; note = 2'-O-methyladenosine-3'-phosphate
  modified_base 5: mod_base = OTHER; note = 2'-O-methylguanosine-3'-phosphate
  modified_base 6: mod_base = OTHER; note = 2'-O-methyladenosine-3'-phosphate
  modified_base 7: mod_base = OTHER; note = 2'-deoxy-2'-fluoroadenosine-3'-phosphate
  modified_base 8: mod_base = OTHER; note = 2'-O-methyladenosine-3'-phosphate
  modified_base 9: mod_base = OTHER; note = 2'-deoxy-2'-fluorocytidine-3'-phosphate
  modified_base 10: mod_base = OTHER; note = 2'-deoxy-2'-fluorouridine-3'-phosphate
  modified_base 11: mod_base = OTHER; note = 2'-deoxy-2'-fluorocytidine-3'-phosphate
  modified_base 12: mod_base = OTHER; note = 2'-O-methyladenosine-3'-phosphate
  modified_base 13: mod_base = OTHER; note = 2'-O-methyladenosine-3'-phosphate
  modified_base 14: mod_base = OTHER; note = 2'-O-methyluridine-3'-phosphate
  modified_base 15: mod_base = OTHER; note = 2'-O-methyladenosine-3'-phosphate
  modified_base 16: mod_base = OTHER; note = 2'-O-methyladenosine-3'-phosphate
  modified_base 17: mod_base = OTHER; note = 2'-O-methyladenosine-3'-phosphate
  modified_base 18: mod_base = OTHER; note = 2'-O-methylguanosine-3'-phosphate
  modified_base 19: mod_base = OTHER; note = 2'-O-methyluridine-3'-phosphate
  modified_base 20: mod_base = OTHER; note = 2'-O-methylguanosine-3'-phosphate
  modified_base 21: mod_base = OTHER; note = 2'-O-methyladenosine-3'-phosphate ((2S,4R)-1-[29-[[2-(acetylamino)-2-deoxy-beta-D-galactopyra nosyl]oxy]-14,14-bis[[3-[[3-[[5-[[2-(acetylamino)-2-deoxy-b eta-D-galactopyranosyl]oxy]-1-oxopentyl]amino]propyl]amino] -3-oxopropoxy]methyl]-1,12,19,25-tetraoxo-16-oxa-13,20,24-t riazanonacos-1-yl]-4-hydroxy-2-pyrrolidinyl)methyl ester
cacagaaactcaataaagtga

SEQ ID NO: 325 - RNA, 23 nt, synthetic construct
  source 1..23: mol_type = other RNA
  modified_base 1: mod_base = OTHER; note = 2'-O-methyluridine-3'-phosphorothioate 5'-(cis-3-phenyl-1,2-dithiaspiro[4.4]nonan-4-yl thiophosphate)
  modified_base 2: mod_base = OTHER; note = 2'-deoxy-2'-fluorocytidine-3'-phosphorothioate
  modified_base 3: mod_base = OTHER; note = 2'-O-methyladenosine-3'-phosphate
  modified_base 4: mod_base = OTHER; note = 2'-O-methylcytidine-3'-phosphate
  modified_base 5: mod_base = OTHER; note = 2'-O-methyluridine-3'-phosphate
  modified_base 6: mod_base = OTHER; note = 2'-deoxy-2'-fluorouridine-3'-phosphate
  modified_base 7: mod_base = OTHER; note = 2'-O-methyluridine-3'-phosphate
  modified_base 8: mod_base = OTHER; note = 2'-deoxy-2'-fluoroadenosine-3'-phosphate
  modified_base 9: mod_base = OTHER; note = 2'-deoxy-2'-fluorouridine-3'-phosphate
  modified_base 10: mod_base = OTHER; note = 2'-O-methyluridine-3'-phosphate
  modified_base 11: mod_base = OTHER; note = 2'-O-methylguanosine-3'-phosphate
  modified_base 12: mod_base = OTHER; note = 2'-O-methyladenosine-3'-phosphate
  modified_base 13: mod_base = OTHER; note = 2'-O-methylguanosine-3'-phosphate
  modified_base 14: mod_base = OTHER; note = 2'-deoxy-2'-fluorouridine-3'-phosphate
  modified_base 15: mod_base = OTHER; note = 2'-O-methyluridine-3'-phosphate
  modified_base 16: mod_base = OTHER; note = 2'-deoxy-2'-fluorouridine-3'-phosphate
  modified_base 17: mod_base = OTHER; note = 2'-O-methylcytidine-3'-phosphate
  modified_base 18: mod_base = OTHER; note = 2'-O-methyluridine-3'-phosphate
  modified_base 19: mod_base = OTHER; note = 2'-O-methylguanosine-3'-phosphate
  modified_base 20: mod_base = OTHER; note = 2'-O-methyluridine-3'-phosphate
  modified_base 21: mod_base = OTHER; note = 2'-O-methylguanosine-3'-phosphorothioate
  modified_base 22: mod_base = OTHER; note = 2'-O-methylcytidine-3'-phosphorothioate
  modified_base 23: mod_base = OTHER; note = 2'-O-methylcytidine
tcactttattgagtttctgtgcc

SEQ ID NO: 326 - RNA, 21 nt, synthetic construct
  source 1..21: mol_type = other RNA
  modified_base 1: mod_base = OTHER; note = 2'-O-methylcytidine-3'-phosphorothioate
  modified_base 2: mod_base = OTHER; note = 2'-O-methyladenosine-3'-phosphorothioate
  modified_base 3: mod_base = OTHER; note = 2'-O-methylcytidine-3'-phosphate
  modified_base 4: mod_base = OTHER; note = 2'-O-methyladenosine-3'-phosphate
  modified_base 5: mod_base = OTHER; note = 2'-O-methylguanosine-3'-phosphate
  modified_base 6: mod_base = OTHER; note = 2'-O-methyladenosine-3'-phosphate
  modified_base 7: mod_base = OTHER; note = 2'-deoxy-2'-fluoroadenosine-3'-phosphate
  modified_base 8: mod_base = OTHER; note = 2'-O-methyladenosine-3'-phosphate
  modified_base 9: mod_base = OTHER; note = 2'-deoxy-2'-fluorocytidine-3'-phosphate
  modified_base 10: mod_base = OTHER; note = 2'-deoxy-2'-fluorouridine-3'-phosphate
  modified_base 11: mod_base = OTHER; note = 2'-deoxy-2'-fluorocytidine-3'-phosphate
  modified_base 12: mod_base = OTHER; note = 2'-O-methyladenosine-3'-phosphate
  modified_base 13: mod_base = OTHER; note = 2'-O-methyladenosine-3'-phosphate
  modified_base 14: mod_base = OTHER; note = 2'-O-methyluridine-3'-phosphate
  modified_base 15: mod_base = OTHER; note = 2'-O-methyladenosine-3'-phosphate
  modified_base 16: mod_base = OTHER; note = 2'-O-methyladenosine-3'-phosphate
  modified_base 17: mod_base = OTHER; note = 2'-O-methyladenosine-3'-phosphate
  modified_base 18: mod_base = OTHER; note = 2'-O-methylguanosine-3'-phosphate
  modified_base 19: mod_base = OTHER; note = 2'-O-methyluridine-3'-phosphate
  modified_base 20: mod_base = OTHER; note = 2'-O-methylguanosine-3'-phosphate
  modified_base 21: mod_base = OTHER; note = 2'-O-methyladenosine-3'-phosphate ((2S,4R)-1-[29-[[2-(acetylamino)-2-deoxy-beta-D-galactopyra nosyl]oxy]-14,14-bis[[3-[[3-[[5-[[2-(acetylamino)-2-deoxy-b eta-D-galactopyranosyl]oxy]-1-oxopentyl]amino]propyl]amino] -3-oxopropoxy]methyl]-1,12,19,25-tetraoxo-16-oxa-13,20,24-t riazanonacos-1-yl]-4-hydroxy-2-pyrrolidinyl)methyl ester
cacagaaactcaataaagtga

SEQ ID NO: 327 - RNA, 23 nt, synthetic construct
  source 1..23: mol_type = other RNA
  modified_base 1: mod_base = OTHER; note = 2'-O-methyluridine-3'-phosphorothioate 5'-(cis-3-phenyl-1,2-dithiaspiro[4.5]decan-4-yl thiophosphate)
  modified_base 2: mod_base = OTHER; note = 2'-deoxy-2'-fluorocytidine-3'-phosphorothioate
  modified_base 3: mod_base = OTHER; note = 2'-O-methyladenosine-3'-phosphate
  modified_base 4: mod_base = OTHER; note = 2'-O-methylcytidine-3'-phosphate
  modified_base 5: mod_base = OTHER; note = 2'-O-methyluridine-3'-phosphate
  modified_base 6: mod_base = OTHER; note = 2'-deoxy-2'-fluorouridine-3'-phosphate
  modified_base 7: mod_base = OTHER; note = 2'-O-methyluridine-3'-phosphate
  modified_base 8: mod_base = OTHER; note = 2'-deoxy-2'-fluoroadenosine-3'-phosphate
  modified_base 9: mod_base = OTHER; note = 2'-deoxy-2'-fluorouridine-3'-phosphate
  modified_base 10: mod_base = OTHER; note = 2'-O-methyluridine-3'-phosphate
  modified_base 11: mod_base = OTHER; note = 2'-O-methylguanosine-3'-phosphate
  modified_base 12: mod_base = OTHER; note = 2'-O-methyladenosine-3'-phosphate
  modified_base 13: mod_base = OTHER; note = 2'-O-methylguanosine-3'-phosphate
  modified_base 14: mod_base = OTHER; note = 2'-deoxy-2'-fluorouridine-3'-phosphate
  modified_base 15: mod_base = OTHER; note = 2'-O-methyluridine-3'-phosphate
  modified_base 16: mod_base = OTHER; note = 2'-deoxy-2'-fluorouridine-3'-phosphate
  modified_base 17: mod_base = OTHER; note = 2'-O-methylcytidine-3'-phosphate
  modified_base 18: mod_base = OTHER; note = 2'-O-methyluridine-3'-phosphate
  modified_base 19: mod_base = OTHER; note = 2'-O-methylguanosine-3'-phosphate
  modified_base 20: mod_base = OTHER; note = 2'-O-methyluridine-3'-phosphate
  modified_base 21: mod_base = OTHER; note = 2'-O-methylguanosine-3'-phosphorothioate
  modified_base 22: mod_base = OTHER; note = 2'-O-methylcytidine-3'-phosphorothioate
  modified_base 23: mod_base = OTHER; note = 2'-O-methylcytidine
tcactttattgagtttctgtgcc

SEQ ID NO: 328 - protein, 8 aa, unidentified
GRGDSPKC

SEQ ID NO: 329 - protein, 5 aa, unidentified
  SITE 4: note = D-phenylalanine
  REGION 1..5: note = cyclic
RGDFC

SEQ ID NO: 330 - protein, 29 aa, unidentified
AALEALAEALEALAEALEALAEAAAAGGC

SEQ ID NO: 331 - protein, 30 aa, unidentified
AALAEALAEALAEALAEALAEALAAAAGGC

SEQ ID NO: 332 - protein, 15 aa, unidentified
ALEALAEALEALAEA

SEQ ID NO: 333 - protein, 22 aa, unidentified
GLFEAIEGFIENGWEGMIWDYG

SEQ ID NO: 334 - protein, 23 aa, unidentified
GLFGAIAGFIENGWEGMIDGWYG

SEQ ID NO: 335 - protein, 48 aa, unidentified
GLFEAIEGFIENGWEGMIDGWYGCGLFEAIEGFIENGWEGMIDGWYGC

SEQ ID NO: 336 - protein, 44 aa, unidentified
GLFEAIEGFIENGWEGMIDGGCGLFEAIEGFIENGWEGMIDGGC

SEQ ID NO: 337 - protein, 35 aa, unidentified
GLFGALAEALAEALAEHLAEALAEALEALAAGGSC

SEQ ID NO: 338 - protein, 34 aa, unidentified
GLFEAIEGFIENGWEGLAEALAEALEALAAGGSC

SEQ ID NO: 339 - protein, 41 aa, unidentified
  SITE 17: note = Norleucine
  SITE 38: note = Norleucine
GLFEAIEGFIENGWEGXIDGKGLFEAIEGFIENGWEGXIDG

SEQ ID NO: 340 - protein, 19 aa, unidentified
LFEALLELLESLWELLLEA

SEQ ID NO: 341 - protein, 20 aa, unidentified
GLFKALLKLLKSLWKLLLKA

SEQ ID NO: 342 - protein, 20 aa, unidentified
GLFRALLRLLRSLWRLLLRA

SEQ ID NO: 343 - protein, 30 aa, unidentified
WEAKLAKALAKALAKHLAKALAKALKACEA

SEQ ID NO: 344 - protein, 22 aa, unidentified
GLFFEAIAEFIEGGWEGLIEGC

SEQ ID NO: 345 - protein, 26 aa, unidentified
GIGAVLKVLTTGLPALISWIKRKRQQ

SEQ ID NO: 346 - protein, 8 aa, unidentified
HHHHHWYG

SEQ ID NO: 347 - protein, 10 aa, unidentified
CHKKKKKKHC

SEQ ID NO: 348 - protein, 16 aa, unidentified
RQIKIWFQNRRMKWKK

SEQ ID NO: 349 - protein, 14 aa, unidentified
GRKKRRQRRRPPQC

SEQ ID NO: 350 - protein, 27 aa, unidentified
GALFLGWLGAAGSTMGAWSQPKKKRKV

SEQ ID NO: 351 - protein, 18 aa, unidentified
LLIILRRRIRKQAHAHSK

SEQ ID NO: 352 - protein, 26 aa, unidentified
GWTLNSAGYLLKINLKALAALAKKIL

SEQ ID NO: 353 - protein, 18 aa, unidentified
KLALKLALKALKAALKLA

SEQ ID NO: 354 - protein, 9 aa, unidentified
RRRRRRRRR

SEQ ID NO: 355 - protein, 10 aa, unidentified
KFFKFFKFFK

SEQ ID NO: 356 - protein, 37 aa, unidentified
LLGDFFRKSKEKIGKEFKRIVQRIKDFLRNLVPRTES

SEQ ID NO: 357 - protein, 31 aa, unidentified
SWLSKTAKKLENSAKKRISEGIAIAIQGGPR

SEQ ID NO: 358 - protein, 30 aa, unidentified
ACYCRIPACIAGERRYGTCIYQGRLWAFCC

SEQ ID NO: 359 - protein, 36 aa, unidentified
DHYNCVSSGGQCLYSACPIFTKIQGTCYRGKAKCCK

SEQ ID NO: 360 - protein, 42 aa, unidentified
  SITE 42: note = C-terminal amide
RRRPRPPYLPRPRPPPFFPPRLPPRIPPGFPPRFPPRFPGKR

SEQ ID NO: 361 - protein, 13 aa, unidentified
  SITE 13: note = C-terminal amide
ILPWKWPWWPWRR

SEQ ID NO: 362 - protein, 16 aa, unidentified
AAVALLPAVLLALLAP

SEQ ID NO: 363 - protein, 11 aa, unidentified
AALLPVLLAAP

SEQ ID NO: 364 - protein, 12 aa, unidentified
RKCRIVVIRVCR

SEQ ID NO: 365 - protein, 10 aa, synthetic construct
  SITE 2: note = L-glycine or N-methyl glycine
  SITE 6: note = L-alpha-amino-butyric acid (Abu)
  SITE 8: note = L-citrulline (Cit)
  SITE 9: note = alpha-amino-isobutyric acid (Aib)
RXDLAXLXXL

SEQ ID NO: 366 - protein, 10 aa, synthetic construct
  SITE 6: note = L-alpha-amino-butyric acid (Abu)
  SITE 8: note = L-citrulline (Cit)
  SITE 9: note = alpha-amino-isobutyric acid (Aib)
  SITE 1: note = N-acetyl
RGDLAXLXXL

SEQ ID NO: 367 - protein, 10 aa, synthetic construct
  SITE 1: note = N-acetyl
  SITE 6: note = L-alpha-amino-butyric acid (Abu)
  SITE 8: note = L-citrulline (Cit)
  SITE 9: note = alpha-amino-isobutyric acid (Aib)
  SITE 10: note = C-terminal amide connected to oligoethylene glycol linker
RGDLAXLXXL